(19) United States
(12) Patent Application Publication
(10) Pub. No.: US 2024/0093199 A1
(43) Pub. Date: Mar. 21, 2024

(54) COMPOSITIONS AND METHODS FOR INHIBITING EXPRESSION OF THE PCSK9 GENE

(71) Applicant: Alnylam Pharmaceuticals, Inc., Cambridge, MA (US)

(72) Inventors: Pamela Tan, Kulmbach (DE); Birgit Bramlage, Kulmbach (DE); Maria Frank-Kamenetsky, Brookline, MA (US); Kevin Fitzgerald, Brookline, MA (US); Akin Akinc, Needham, MA (US); Victor E. Kotelianski, Boston, MA (US)

(21) Appl. No.: 18/116,903

(22) Filed: Mar. 3, 2023

Related U.S. Application Data
(63) Continuation of application No. 17/186,078, filed on Feb. 26, 2021, now abandoned.
Application No. 17/186,078 is a continuation of application No. 16/675,035, filed on Nov. 5, 2019, now abandoned.
Application No. 16/675,035 is a continuation of application No. 15/807,275, filed on Nov. 8, 2017, now Pat. No. 10,501,742.
Application No. 15/807,275 is a continuation of application No. 15/005,933, filed on Jan. 25, 2016, now Pat. No. 9,822,365.
Application No. 15/005,933 is a continuation of application No. 14/330,923, filed on Jul. 14, 2014, now Pat. No. 9,260,718.
Application No. 14/330,923 is a continuation of application No. 13/472,438, filed on May 15, 2012, now Pat. No. 8,809,292.
Application No. 13/472,438 is a continuation of application No. 12/554,231, filed on Sep. 4, 2009, now Pat. No. 8,222,222.
Application No. 12/554,231 is a division of application No. 11/746,864, filed on May 10, 2007, now Pat. No. 7,605,251.
(60) Provisional application No. 60/901,134, filed on Feb. 13, 2007.
(60) Provisional application No. 60/829,914, filed on Oct. 18, 2006.
(60) Provisional application No. 60/840,089, filed on Aug. 25, 2006.
(60) Provisional application No. 60/817,203, filed on Jun. 27, 2006.
(60) Provisional application No. 60/799,458, filed on May 11, 2006.

(51) Int. Cl. C12N 15/113; A61K 31/713

(52) U.S. Cl. CPC C12N 15/1137; A61K 31/713; C12N 2310/111; C12N 2310/14; C12N 2310/315; C12N 2310/321; C12N 2310/322; C12N 2310/332; C12N 2310/3515

(57) ABSTRACT

The invention relates to a double-stranded ribonucleic acid (dsRNA) for inhibiting the expression of the PCSK9 gene (PCSK9 gene), comprising an antisense strand having a nucleotide sequence which is less that 30 nucleotides in length, generally 19-25 nucleotides in length, and which is substantially complementary to at least a part of the PCSK9 gene. The invention also relates to a pharmaceutical composition comprising the dsRNA together with a pharmaceutically acceptable carrier and method for treating diseases caused by PCSK9 gene expression.

### CROSS-REFERENCE TO RELATED APPLICATIONS

[0001] This application is a continuation of U.S. application Ser. No. 17/186,078, filed on Feb. 26, 2021, which is a continuation of U.S. application Ser. No. 16/675,035, filed on Nov. 5, 2019, which is a continuation of U.S. application Ser. No. 15/807,275, filed Nov. 8, 2017, now U.S. Pat. No. 10,501,742, issued on Dec. 10, 2019, which is a continuation of U.S. application Ser. No. 15/005,933, filed on Jan. 25, 2016, now U.S. Pat. No. 9,822,365, issued Nov. 21, 2017, which is a continuation of U.S. application Ser. No. 14/330,923 filed on Jul. 14, 2014, now U.S. Pat. No. 9,260,718, issued Feb. 16, 2016, which is a continuation of U.S. application Ser. No. 13/472,438, filed on May 15, 2012, now U.S. Pat. No. 8,809,292 issued Aug. 19, 2014, which is a continuation of U.S. application Ser. No. 12/554,231, filed on Sep. 4, 2009, now U.S. Pat. No. 8,222,222, issued on Jul. 17, 2012, which is a divisional of U.S. application Ser. No. 11/746,864, filed on May 10, 2007, now U.S. Pat. No. 7,605,251, issued on Oct. 20, 2009, which claims the benefit of and priority to U.S. Provisional Application No. 60/799,458, filed on May 11, 2006; U.S. Provisional Application No. 60/817,203, filed on Jun. 27, 2006; U.S. Provisional Application No. 60/840,089, filed Aug. 25, 2006; U.S. Provisional Application No. 60/829,914, filed on Oct. 18, 2006; and U.S. Provisional Application No. 60/901,134, filed on Feb. 13, 2007. The contents of all of these applications are hereby incorporated by reference in their entirety.

### FIELD OF THE INVENTION

[0002] This invention relates to double-stranded ribonucleic acid (dsRNA), and its use in mediating RNA interference to inhibit the expression of the PCSK9 gene and the use of the dsRNA to treat pathological processes which can be mediated by down regulating PCSK9, such as hyperlipidemia.

### SEQUENCE LISTING

[0003] The application contains a Sequence Listing which has been submitted electronically in .XML format and is hereby incorporated by reference in its entirety. Said .XML copy, created on Oct. 31, 2023, is named “121301_13014_SL.xml” and is 18,503,431 bytes in size. The sequence listing contained in this .XML file is part of the specification and is hereby incorporated by reference herein in its entirety.

### BACKGROUND OF THE INVENTION

[0004] Proprotein convertase subtilisin kexin 9 (PCSK9) is a member of the subtilisin serine protease family The other eight mammalian subtilisin proteases, PCSK1-PCSK8 (also called PC1/3, PC2, furin, PC4, PC5/6, PACE4, PC7, and S1P/SKI-1) are proprotein convertases that process a wide variety of proteins in the secretory pathway and play roles in diverse biological processes (Bergeron, F. (2000) J. Mol. Endocrinol. 24, 1-22, Gensberg, K., (1998) Semin. Cell Dev. Biol. 9, 11-17, Seidah, N. G. (1999) Brain Res. 848, 45-62, Taylor, N. A., (2003) FASEB J. 17, 1215-1227, and Zhou, A., (1999) J. Biol. Chem. 274, 20745-20748). PCSK9 has been proposed to play a role in cholesterol metabolism. PCSK9 mRNA expression is down-regulated by dietary cholesterol feeding in mice (Maxwell, K. N., (2003) J. Lipid Res. 44, 2109-2119), up-regulated by statins in HepG2 cells (Dubuc, G., (2004) Arterioscler. Thromb. Vasc. Biol. 24, 1454-1459), and up-regulated in sterol regulatory element binding protein (SREBP) transgenic mice (Horton, J. D., (2003) Proc. Natl. Acad. Sci. USA 100, 12027-12032), similar to the cholesterol biosynthetic enzymes and the low-density lipoprotein receptor (LDLR). Furthermore, PCSK9 missense mutations have been found to be associated with a form of autosomal dominant hypercholesterolemia (Hchola3) (Abifadel, M., et al. (2003) Nat. Genet. 34, 154-156, Timms, K. M., (2004) Hum. Genet. 114, 349-353, Leren, T. P. (2004) Clin. Genet. 65, 419-422). PCSK9 may also play a role in determining LDL cholesterol levels in the general population, because single-nucleotide polymorphisms (SNPs) have been associated with cholesterol levels in a Japanese population (Shioji, K., (2004) J. Hum. Genet. 49, 109-114).

[0005] Autosomal dominant hypercholesterolemias (ADHs) are monogenic diseases in which patients exhibit elevated total and LDL cholesterol levels, tendon xanthomas, and premature atherosclerosis (Rader, D. J., (2003) J. Clin. Invest. 111, 1795-1803). The pathogenesis of ADHs and a recessive form, autosomal recessive hypercholesterolemia (ARH) (Cohen, J. C., (2003) Curr. Opin. Lipidol. 14, 121-127), is due to defects in LDL uptake by the liver. ADH may be caused by LDLR mutations, which prevent LDL uptake, or by mutations in the protein on LDL, apolipoprotein B, which binds to the LDLR. ARH is caused by mutations in the ARH protein that are necessary for endocytosis of the LDLR-LDL complex via its interaction with clathrin. Therefore, if PCSK9 mutations are causative in Hchola3 families, it seems likely that PCSK9 plays a role in receptor-mediated LDL uptake.

[0006] Overexpression studies point to a role for PCSK9 in controlling LDLR levels and, hence, LDL uptake by the liver (Maxwell, K. N. (2004) Proc. Natl. Acad. Sci. USA 101, 7100-7105, Benjannet, S., et al. (2004) J. Biol. Chem. 279, 48865-48875, Park, S. W., (2004) J. Biol. Chem. 279, 50630-50638). Adenoviral-mediated overexpression of mouse or human PCSK9 for 3 or 4 days in mice results in elevated total and LDL cholesterol levels; this effect is not seen in LDLR knockout animals (Maxwell, K. N. (2004) Proc. Natl. Acad. Sci. USA 101, 7100-7105, Benjannet, S., et al. (2004) J. Biol. Chem. 279, 48865-48875, Park, S. W., (2004) J. Biol. Chem. 279, 50630-50638). In addition, PCSK9 overexpression results in a severe reduction in hepatic LDLR protein, without affecting LDLR mRNA levels, SREBP protein levels, or SREBP protein nuclear to cytoplasmic ratio. These results indicate that PCSK9, either directly or indirectly, reduces LDLR protein levels by a posttranscriptional mechanism

[0007] Loss of function mutations in PCSK9 have been designed in mouse models (Rashid et.al., (2005) PNAS, 102, 5374-5379, and identified in human individuals Cohen et al., (2005), Nature Genetics, 37, 161-165. In both cases loss of PCSK9 function lead to lowering of total and LDLc cholesterol. In a retrospective outcome study over 15 years, loss of one copy of PCSK9 was shown to shift LDLc lower and to lead to an increased risk-benefit protection from developing cardiovascular heart disease (Cohen et.al., 2006 N. Engl. J. Med., 354, 1264-1272.). Clearly the evidence to date indicates that lowering of PCSK9 levels will lower LDLc.

[0008] Recently, double-stranded RNA molecules (dsRNA) have been shown to block gene expression in a highly conserved regulatory mechanism known as RNA interference (RNAi). WO 99/32619 (Fire et al.) discloses the use of a dsRNA of at least 25 nucleotides in length to inhibit the expression of genes in C. elegans. dsRNA has also been shown to degrade target RNA in other organisms, including plants (see, e.g., WO 99/53050, Waterhouse et al.; and WO 99/61631, Heifetz et al.), Drosophila (see, e.g., Yang, D., et al., Curr. Biol. (2000) 10:1191-1200), and mammals (see WO 00/44895, Limmer; and DE 101 00 586.5, Kreutzer et al.). This natural mechanism has now become the focus for the development of a new class of pharmaceutical agents for treating disorders that are caused by the aberrant or unwanted regulation of a gene.

[0009] Despite significant advances in the field of RNAi and advances in the treatment of pathological processes which can be mediated by down regulating PCSK9 gene expression, there remains a need for agents that can inhibit PCSK9 gene expression and that can treat diseases associated with PCSK9 gene expression such as hyperlipidemia.

### SUMMARY OF THE INVENTION

[0010] The invention provides a solution to the problem of treating diseases that can be modulated by down regulating the proprotein convertase subtilisin kexin 9 (PCSK9) by using double-stranded ribonucleic acid (dsRNA) to silence PCSK9 expression.

[0011] The invention provides double-stranded ribonucleic acid (dsRNA), as well as compositions and methods for inhibiting the expression of the PCSK9 gene in a cell or mammal using such dsRNA. The invention also provides compositions and methods for treating pathological conditions that can modulated by down regulating the expression of the PCSK9 gene, such as hyperlipidemia. The dsRNA of the invention comprises an RNA strand (the antisense strand) having a region which is less than 30 nucleotides in length, generally 19-24 nucleotides in length, and is substantially complementary to at least part of an mRNA transcript of the PCSK9 gene.

[0012] In one embodiment, the invention provides double-stranded ribonucleic acid (dsRNA) molecules for inhibiting the expression of the PCSK9 gene. The dsRNA comprises at least two sequences that are complementary to each other. The dsRNA comprises a sense strand comprising a first sequence and an antisense strand comprising a second sequence. The antisense strand comprises a nucleotide sequence which is substantially complementary to at least part of an mRNA encoding PCSK9, and the region of complementarity is less than 30 nucleotides in length, generally 19-24 nucleotides in length. The dsRNA, upon contacting with a cell expressing the PCSK9, inhibits the expression of the PCSK9 gene by at least 40%.

[0013] For example, the dsRNA molecules of the invention can be comprised of a first sequence of the dsRNA that is selected from the group consisting of the sense sequences of Table 1 and Table 2 the second sequence is selected from the group consisting of the antisense sequences of Tables 1 and Table 2. The dsRNA molecules of the invention can be comprised of naturally occurring nucleotides or can be comprised of at least one modified nucleotide, such as a 2′-O-methyl modified nucleotide, a nucleotide comprising a 5′-phosphorothioate group, and a terminal nucleotide linked to a cholesteryl derivative. Alternatively, the modified nucleotide may be chosen from the group of: a 2′-deoxy-2′-fluoro modified nucleotide, a 2′-deoxy-modified nucleotide, a locked nucleotide, an abasic nucleotide, 2′-amino-modified nucleotide, 2′-alkyl-modified nucleotide, morpholino nucleotide, a phosphoramidate, and a non-natural base comprising nucleotide. Generally, such modified sequence will be based on a first sequence of the dsRNA selected from the group consisting of the sense sequences of Tables 1 and Table 2 and a second sequence selected from the group consisting of the antisense sequences of Tables 1, and Table 2.

[0014] In another embodiment, the invention provides a cell comprising one of the dsRNAs of the invention. The cell is generally a mammalian cell, such as a human cell.

[0015] In another embodiment, the invention provides a pharmaceutical composition for inhibiting the expression of the PCSK9 gene in an organism, generally a human subject, comprising one or more of the dsRNA of the invention and a pharmaceutically acceptable carrier or delivery vehicle.

[0016] In another embodiment, the invention provides a method for inhibiting the expression of the PCSK9 gene in a cell, comprising the following steps:
[0017] (a) introducing into the cell a double-stranded ribonucleic acid (dsRNA), wherein the dsRNA comprises at least two sequences that are complementary to each other. The dsRNA comprises a sense strand comprising a first sequence and an antisense strand comprising a second sequence. The antisense strand comprises a region of complementarity which is substantially complementary to at least a part of a mRNA encoding PCSK9, and wherein the region of complementarity is less than 30 nucleotides in length, generally 19-24 nucleotides in length, and wherein the dsRNA, upon contact with a cell expressing the PCSK9, inhibits expression of the PCSK9 gene by at least 40%; and
[0018] (b) maintaining the cell produced in step (a) for a time sufficient to obtain degradation of the mRNA transcript of the PCSK9 gene, thereby inhibiting expression of the PCSK9 gene in the cell.

[0019] In another embodiment, the invention provides methods for treating, preventing or managing pathological processes which can be mediated by down regulating PCSK9 gene expression, e.g. hyperlipidemia, comprising administering to a patient in need of such treatment, prevention or management a therapeutically or prophylactically effective amount of one or more of the dsRNAs of the invention.

[0020] In another embodiment, the invention provides vectors for inhibiting the expression of the PCSK9 gene in a cell, comprising a regulatory sequence operably linked to a nucleotide sequence that encodes at least one strand of one of the dsRNA of the invention.

[0021] In another embodiment, the invention provides a cell comprising a vector for inhibiting the expression of the PCSK9 gene in a cell. The vector comprises a regulatory sequence operably linked to a nucleotide sequence that encodes at least one strand of one of the dsRNA of the invention.

### BRIEF DESCRIPTION OF THE FIGURES

[0022] FIG. 1 shows the structure of the ND-98 lipid.

[0023] FIG. 2 shows the results of the in vivo screen of 16 mouse specific (AL-DP-9327 through AL-DP-9342) PCSK9 siRNAs directed against different ORF regions of PCSK9 mRNA (having the first nucleotide corresponding to the ORF position indicated on the graph) in C57/BL6 mice (5 animals/group). The ratio of PCSK9 mRNA to GAPDH mRNA in liver lysates was averaged over each treatment group and compared to a control group treated with PBS or a control group treated with an unrelated siRNA (blood coagulation factor VII).

[0024] FIG. 3 shows the results of the in vivo screen of 16 human/mouse/rat crossreactive (AL-DP-9311 through AL-DP-9326) PCSK9 siRNAs directed against different ORF regions of PCSK9 mRNA (having the first nucleotide corresponding to the ORF position indicated on the graph) in C57/BL6 mice (5 animals/group). The ratio of PCSK9 mRNA to GAPDH mRNA in liver lysates was averaged over each treatment group and compared to a control group treated with PBS or a control group treated with an unrelated siRNA (blood coagulation factor VII). Silencing of PCSK9 mRNA resulted in lowering total serum cholesterol levels. The most efficacious in terms of knocking down PSCK9 message siRNAs showed the most pronounced cholesterol lowering effect (around 20-30%).

[0025] FIG. 4 shows the results of the in vivo screen of 16 mouse specific (AL-DP-9327 through AL-DP-9342) PCSK9 siRNAs in C57/BL6 mice (5 animals/group). Total serum cholesterol levels were averaged over each treatment group and compared to a control group treated with PBS or a control group treated with an unrelated siRNA (blood coagulation factor VII).

[0026] FIG. 5 shows the results of the in vivo screen of 16 human/mouse/rat crossreactive (AL-DP-9311 through AL-DP-9326) PCSK9 siRNAs in C57/BL6 mice (5 animals/group). Total serum cholesterol levels were averaged over each treatment group and compared to a control group treated with PBS or a control group treated with an unrelated siRNA (blood coagulation factor VII).

[0027] FIG. 6A and FIG. 6B each shows a comparison of the in vitro and in vivo results for silencing PCSK9.

[0028] FIG. 7A and FIG. 7B show in vitro results for silencing PCSK9 using monkey primary hepatocytes.

[0029] FIG. 8 shows in vivo activity of LNP-01 formulated siRNAs to pcsk-9.

[0030] FIG. 9 shows in vivo activity of LNP-01 Formulated chemically modified 9314 and 10792 parent molecules at different times. Clearly modified versions of 10792 display in vivo silencing activity.

### DETAILED DESCRIPTION OF THE INVENTION

[0031] The invention provides a solution to the problem of treating diseases that can be modulated by the down regulation of the PCSK9 gene, by using double-stranded ribonucleic acid (dsRNA) to silence the PCSK9 gene thus providing treatment for diseases such as hyperlipidemia.

[0032] The invention provides double-stranded ribonucleic acid (dsRNA), as well as compositions and methods for inhibiting the expression of the PCSK9 gene in a cell or mammal using the dsRNA. The invention also provides compositions and methods for treating pathological conditions and diseases that can be modulated by down regulating the expression of the PCSK9 gene. dsRNA directs the sequence-specific degradation of mRNA through a process known as RNA interference (RNAi).

[0033] The dsRNA of the invention comprises an RNA strand (the antisense strand) having a region which is less than 30 nucleotides in length, generally 19-24 nucleotides in length, and is substantially complementary to at least part of an mRNA transcript of the PCSK9 gene. The use of these dsRNAs enables the targeted degradation of an mRNA that is involved in sodium transport. Using cell-based and animal assays, the present inventors have demonstrated that very low dosages of these dsRNA can specifically and efficiently mediate RNAi, resulting in significant inhibition of expression of the PCSK9 gene. Thus, the methods and compositions of the invention comprising these dsRNAs are useful for treating pathological processes which can be mediated by down regulating PCSK9, such as in the treatment of hyperlipidemia.

[0034] The following detailed description discloses how to make and use the dsRNA and compositions containing dsRNA to inhibit the expression of the target PCSK9 gene, as well as compositions and methods for treating diseases that can be modulated by down regulating the expression of PCSK9, such as hyperlipidemia. The pharmaceutical compositions of the invention comprise a dsRNA having an antisense strand comprising a region of complementarity which is less than 30 nucleotides in length, generally 19-24 nucleotides in length, and is substantially complementary to at least part of an RNA transcript of the PCSK9 gene, together with a pharmaceutically acceptable carrier.

[0035] Accordingly, certain aspects of the invention provide pharmaceutical compositions comprising the dsRNA of the invention together with a pharmaceutically acceptable carrier, methods of using the compositions to inhibit expression of the PCSK9 gene, and methods of using the pharmaceutical compositions to treat diseases that can be modulated by down regulating the expression of PCSK9.

### I. Definitions

[0036] For convenience, the meaning of certain terms and phrases used in the specification, examples, and appended claims, are provided below. If there is an apparent discrepancy between the usage of a term in other parts of this specification and its definition provided in this section, the definition in this section shall prevail.

[0037] “G,” “C,” “A” and “U” each generally stand for a nucleotide that contains guanine, cytosine, adenine, and uracil as a base, respectively. However, it will be understood that the term “ribonucleotide” or “nucleotide” can also refer to a modified nucleotide, as further detailed below, or a surrogate replacement moiety. The skilled person is well aware that guanine, cytosine, adenine, and uracil may be replaced by other moieties without substantially altering the base pairing properties of an oligonucleotide comprising a nucleotide bearing such replacement moiety. For example, without limitation, a nucleotide comprising inosine as its base may base pair with nucleotides containing adenine, cytosine, or uracil. Hence, nucleotides containing uracil, guanine, or adenine may be replaced in the nucleotide sequences of the invention by a nucleotide containing, for example, inosine. Sequences comprising such replacement moieties are embodiments of the invention.

[0038] As used herein, “PCSK9” refers to the proprotein convertase subtilisin kexin 9 gene or protein (also known as FH3, HCHOLA3, NARC-1, NARC1). mRNA sequences to PCSK9 are provided as human: NM_174936; mouse: NM_153565, and rat: NM_199253.

[0039] As used herein, “target sequence” refers to a contiguous portion of the nucleotide sequence of an mRNA molecule formed during the transcription of the PCSK9 gene, including mRNA that is a product of RNA processing of a primary transcription product.

[0040] As used herein, the term “strand comprising a sequence” refers to an oligonucleotide comprising a chain of nucleotides that is described by the sequence referred to using the standard nucleotide nomenclature.

[0041] As used herein, and unless otherwise indicated, the term “complementary,” when used to describe a first nucleotide sequence in relation to a second nucleotide sequence, refers to the ability of an oligonucleotide or polynucleotide comprising the first nucleotide sequence to hybridize and form a duplex structure under certain conditions with an oligonucleotide or polynucleotide comprising the second nucleotide sequence, as will be understood by the skilled person. Such conditions can, for example, be stringent conditions, where stringent conditions may include: 400 mM NaCl, 40 mM PIPES pH 6.4, 1 mM EDTA, 50° C. or 70° C. for 12-16 hours followed by washing. Other conditions, such as physiologically relevant conditions as may be encountered inside an organism, can apply. The skilled person will be able to determine the set of conditions most appropriate for a test of complementarity of two sequences in accordance with the ultimate application of the hybridized nucleotides.

[0042] This includes base-pairing of the oligonucleotide or polynucleotide comprising the first nucleotide sequence to the oligonucleotide or polynucleotide comprising the second nucleotide sequence over the entire length of the first and second nucleotide sequence. Such sequences can be referred to as “fully complementary” with respect to each other herein. However, where a first sequence is referred to as “substantially complementary” with respect to a second sequence herein, the two sequences can be fully complementary, or they may form one or more, but generally not more than 4, 3 or 2 mismatched base pairs upon hybridization, while retaining the ability to hybridize under the conditions most relevant to their ultimate application. However, where two oligonucleotides are designed to form, upon hybridization, one or more single stranded overhangs, such overhangs shall not be regarded as mismatches with regard to the determination of complementarity. For example, a dsRNA comprising one oligonucleotide 21 nucleotides in length and another oligonucleotide 23 nucleotides in length, wherein the longer oligonucleotide comprises a sequence of 21 nucleotides that is fully complementary to the shorter oligonucleotide, may yet be referred to as “fully complementary” for the purposes of the invention.

[0043] “Complementary” sequences, as used herein, may also include, or be formed entirely from, non-Watson-Crick base pairs and/or base pairs formed from non-natural and modified nucleotides, in as far as the above requirements with respect to their ability to hybridize are fulfilled.

[0044] The terms “complementary”, “fully complementary” and “substantially complementary” herein may be used with respect to the base matching between the sense strand and the antisense strand of a dsRNA, or between the antisense strand of a dsRNA and a target sequence, as will be understood from the context of their use.

[0045] As used herein, a polynucleotide which is “substantially complementary to at least part of” a messenger RNA (mRNA) refers to a polynucleotide which is substantially complementary to a contiguous portion of the mRNA of interest (e.g., encoding PCSK9). For example, a polynucleotide is complementary to at least a part of a PCSK9 mRNA if the sequence is substantially complementary to a non-interrupted portion of a mRNA encoding PCSK9.

[0046] The term “double-stranded RNA” or “dsRNA”, as used herein, refers to a complex of ribonucleic acid molecules, having a duplex structure comprising two anti-parallel and substantially complementary, as defined above, nucleic acid strands. The two strands forming the duplex structure may be different portions of one larger RNA molecule, or they may be separate RNA molecules. Where separate RNA molecules, such dsRNA are often referred to in the literature as siRNA (“short interfering RNA”). Where the two strands are part of one larger molecule, and therefore are connected by an uninterrupted chain of nucleotides between the 3′-end of one strand and the 5′end of the respective other strand forming the duplex structure, the connecting RNA chain is referred to as a “hairpin loop”, “short hairpin RNA” or “shRNA”. Where the two strands are connected covalently by means other than an uninterrupted chain of nucleotides between the 3′-end of one strand and the 5′end of the respective other strand forming the duplex structure, the connecting structure is referred to as a “linker”. The RNA strands may have the same or a different number of nucleotides. The maximum number of base pairs is the number of nucleotides in the shortest strand of the dsRNA minus any overhangs that are present in the duplex. In addition to the duplex structure, a dsRNA may comprise one or more nucleotide overhangs. In addition, as used in this specification, “dsRNA” may include chemical modifications to ribonucleotides, including substantial modifications at multiple nucleotides and including all types of modifications disclosed herein or known in the art. Any such modifications, as used in an siRNA type molecule, are encompassed by “dsRNA” for the purposes of this specification and claims.

[0047] As used herein, a “nucleotide overhang” refers to the unpaired nucleotide or nucleotides that protrude from the duplex structure of a dsRNA when a 3′-end of one strand of the dsRNA extends beyond the 5′-end of the other strand, or vice versa. “Blunt” or “blunt end” means that there are no unpaired nucleotides at that end of the dsRNA, i.e., no nucleotide overhang. A “blunt ended” dsRNA is a dsRNA that is double-stranded over its entire length, i.e., no nucleotide overhang at either end of the molecule. For clarity, chemical caps or non-nucleotide chemical moieties conjugated to the 3′ end or 5′ end of an siRNA are not considered in determining whether an siRNA has an overhang or is blunt ended.

[0048] The term “antisense strand” refers to the strand of a dsRNA which includes a region that is substantially complementary to a target sequence. As used herein, the term “region of complementarity” refers to the region on the antisense strand that is substantially complementary to a sequence, for example a target sequence, as defined herein. Where the region of complementarity is not fully complementary to the target sequence, the mismatches are most tolerated in the terminal regions and, if present, are generally in a terminal region or regions, e.g., within 6, 5, 4, 3, or 2 nucleotides of the 5′ and/or 3′ terminus.

[0049] The term “sense strand,” as used herein, refers to the strand of a dsRNA that includes a region that is substantially complementary to a region of the antisense strand.

[0050] “Introducing into a cell”, when referring to a dsRNA, means facilitating uptake or absorption into the cell, as is understood by those skilled in the art. Absorption or uptake of dsRNA can occur through unaided diffusive or active cellular processes, or by auxiliary agents or devices. The meaning of this term is not limited to cells in vitro; a dsRNA may also be “introduced into a cell”, wherein the cell is part of a living organism. In such instance, introduction into the cell will include the delivery to the organism. For example, for in vivo delivery, dsRNA can be injected into a tissue site or administered systemically. In vitro introduction into a cell includes methods known in the art such as electroporation and lipofection.

[0051] The terms “silence” and “inhibit the expression of”, in as far as they refer to the PCSK9 gene, herein refer to the at least partial suppression of the expression of the PCSK9 gene, as manifested by a reduction of the amount of mRNA transcribed from the PCSK9 gene which may be isolated from a first cell or group of cells in which the PCSK9 gene is transcribed and which has or have been treated such that the expression of the PCSK9 gene is inhibited, as compared to a second cell or group of cells substantially identical to the first cell or group of cells but which has or have not been so treated (control cells). The degree of inhibition is usually expressed in terms of

$$\frac{( mRNA in control cells ) - ( mRNA in treated cells )}{( mRNA in control cells )} \cdot 100 \%$$

[0052] Alternatively, the degree of inhibition may be given in terms of a reduction of a parameter that is functionally linked to PCSK9 gene transcription, e.g. the amount of protein encoded by the PCSK9 gene which is secreted by a cell, or the number of cells displaying a certain phenotype, e.g apoptosis. In principle, PCSK9 gene silencing may be determined in any cell expressing the target, either constitutively or by genomic engineering, and by any appropriate assay. However, when a reference is needed in order to determine whether a given dsRNA inhibits the expression of the PCSK9 gene by a certain degree and therefore is encompassed by the instant invention, the assay provided in the Examples below shall serve as such reference.

[0053] For example, in certain instances, expression of the PCSK9 gene is suppressed by at least about 20%, 25%, 35%, or 50% by administration of the double-stranded oligonucleotide of the invention. In some embodiment, the PCSK9 gene is suppressed by at least about 60%, 70%, or 80% by administration of the double-stranded oligonucleotide of the invention. In some embodiments, the PCSK9 gene is suppressed by at least about 85%, 90%, or 95% by administration of the double-stranded oligonucleotide of the invention. Tables 1, 2, provides a wide range of values for inhibition of expression obtained in an in vitro assay using various PCSK9 dsRNA molecules at various concentrations.

[0054] As used herein in the context of PCSK9 expression, the terms “treat”, “treatment”, and the like, refer to relief from or alleviation of pathological processes which can be mediated by down regulating PCSK9 gene. In the context of the present invention insofar as it relates to any of the other conditions recited herein below (other than pathological processes which can be mediated by down regulating the PCSK9 gene), the terms “treat”, “treatment”, and the like mean to relieve or alleviate at least one symptom associated with such condition, or to slow or reverse the progression of such condition. For example, in the context of hyperlipidemia, treatment will involve a decrease in serum lipid levels.

[0055] As used herein, the phrases “therapeutically effective amount” and “prophylactically effective amount” refer to an amount that provides a therapeutic benefit in the treatment, prevention, or management of pathological processes which can be mediated by down regulating the PCSK9 gene on or an overt symptom of pathological processes which can be mediated by down regulating the PCSK9 gene. The specific amount that is therapeutically effective can be readily determined by ordinary medical practitioner, and may vary depending on factors known in the art, such as, e.g. the type of pathological processes which can be mediated by down regulating the PCSK9 gene, the patient's history and age, the stage of pathological processes which can be mediated by down regulating PCSK9 gene expression, and the administration of other anti-pathological processes which can be mediated by down regulating PCSK9 gene expression.

[0056] As used herein, a “pharmaceutical composition” comprises a pharmacologically effective amount of a dsRNA and a pharmaceutically acceptable carrier. As used herein, “pharmacologically effective amount,” “therapeutically effective amount” or simply “effective amount” refers to that amount of an RNA effective to produce the intended pharmacological, therapeutic or preventive result. For example, if a given clinical treatment is considered effective when there is at least a 25% reduction in a measurable parameter associated with a disease or disorder, a therapeutically effective amount of a drug for the treatment of that disease or disorder is the amount necessary to effect at least a 25% reduction in that parameter.

[0057] The term “pharmaceutically acceptable carrier” refers to a carrier for administration of a therapeutic agent. Such carriers include, but are not limited to, saline, buffered saline, dextrose, water, glycerol, ethanol, and combinations thereof and are described in more detail below. The term specifically excludes cell culture medium.

[0058] As used herein, a “transformed cell” is a cell into which a vector has been introduced from which a dsRNA molecule may be expressed.

### II. Double-Stranded Ribonucleic Acid (dsRNA)

[0059] In one embodiment, the invention provides double-stranded ribonucleic acid (dsRNA) molecules for inhibiting the expression of the PCSK9 gene in a cell or mammal, wherein the dsRNA comprises an antisense strand comprising a region of complementarity which is complementary to at least a part of an mRNA formed in the expression of the PCSK9 gene, and wherein the region of complementarity is less than 30 nucleotides in length, generally 19-24 nucleotides in length, and wherein the dsRNA, upon contact with a cell expressing the PCSK9 gene, inhibits the expression of the PCSK9 gene by at least 40%. The dsRNA comprises two RNA strands that are sufficiently complementary to hybridize to form a duplex structure. One strand of the dsRNA (the antisense strand) comprises a region of complementarity that is substantially complementary, and generally fully complementary, to a target sequence, derived from the sequence of an mRNA formed during the expression of the PCSK9 gene, the other strand (the sense strand) comprises a region which is complementary to the antisense strand, such that the two strands hybridize and form a duplex structure when combined under suitable conditions. Generally, the duplex structure is between 15 and 30, more generally between 18 and 25, yet more generally between 19 and 24, and most generally between 19 and 21 base pairs in length. Similarly, the region of complementarity to the target sequence is between 15 and 30, more generally between 18 and 25, yet more generally between 19 and 24, and most generally between 19 and 21 nucleotides in length. The dsRNA of the invention may further comprise one or more single-stranded nucleotide overhang(s). The dsRNA can be synthesized by standard methods known in the art as further discussed below, e.g., by use of an automated DNA synthesizer, such as are commercially available from, for example, Biosearch, Applied Biosystems, Inc. In a preferred embodiment, the PCSK9 gene is the human PCSK9 gene. In specific embodiments, the antisense strand of the dsRNA comprises a strand selected from the sense sequences of Tables 1 and 2, and a second sequence selected from the group consisting of the antisense sequences of Tables 1 and 2. Alternative antisense agents that target elsewhere in the target sequence provided in Tables 1 and 2, can readily be determined using the target sequence and the flanking PCSK9 sequence.

[0060] In further embodiments, the dsRNA comprises at least one nucleotide sequence selected from the groups of sequences provided in Tables 1 and 2. In other embodiments, the dsRNA comprises at least two sequences selected from this group, wherein one of the at least two sequences is complementary to another of the at least two sequences, and one of the at least two sequences is substantially complementary to a sequence of an mRNA generated in the expression of the PCSK9 gene. Generally, the dsRNA comprises two oligonucleotides, wherein one oligonucleotide is described as the sense strand in Tables 1 and 2 and the second oligonucleotide is described as the antisense strand in Tables 1 and 2

[0061] The skilled person is well aware that dsRNAs comprising a duplex structure of between 20 and 23, but specifically 21, base pairs have been hailed as particularly effective in inducing RNA interference (Elbashir et al., EMBO 2001, 20:6877-6888). However, others have found that shorter or longer dsRNAs can be effective as well. In the embodiments described above, by virtue of the nature of the oligonucleotide sequences provided in Tables 1 and 2, the dsRNAs of the invention can comprise at least one strand of a length of minimally 21 nt. It can be reasonably expected that shorter dsRNAs comprising one of the sequences of Tables 1 and 2 minus only a few nucleotides on one or both ends may be similarly effective as compared to the dsRNAs described above. Hence, dsRNAs comprising a partial sequence of at least 15, 16, 17, 18, 19, 20, or more contiguous nucleotides from one of the sequences of Tables 1 and 2, and differing in their ability to inhibit the expression of the PCSK9 gene in a FACS assay as described herein below by not more than 5, 10, 15, 20, 25, or 30% inhibition from a dsRNA comprising the full sequence, are contemplated by the invention. Further dsRNAs that cleave within the target sequence provided in Tables 1 and 2 can readily be made using the PCSK9 sequence and the target sequence provided.

[0062] In addition, the RNAi agents provided in Tables 1 and 2 identify a site in the PCSK9 mRNA that is susceptible to RNAi based cleavage. As such the present invention further includes RNAi agents that target within the sequence targeted by one of the agents of the present invention. As used herein a second RNAi agent is the to target within the sequence of a first RNAi agent if the second RNAi agent cleaves the message anywhere within the mRNA that is complementary to the antisense strand of the first RNAi agent. Such a second agent will generally consist of at least 15 contiguous nucleotides from one of the sequences provided in Tables 1 and 2 coupled to additional nucleotide sequences taken from the region contiguous to the selected sequence in the PCSK9 gene. For example, the last 15 nucleotides of SEQ ID NO:1 (minus the added AA sequences) combined with the next 6 nucleotides from the target PCSK9 gene produces a single strand agent of 21 nucleotides that is based on one of the sequences provided in Tables 1 and 2.

[0063] The dsRNA of the invention can contain one or more mismatches to the target sequence. In a preferred embodiment, the dsRNA of the invention contains no more than 3 mismatches. If the antisense strand of the dsRNA contains mismatches to a target sequence, it is preferable that the area of mismatch not be located in the center of the region of complementarity. If the antisense strand of the dsRNA contains mismatches to the target sequence, it is preferable that the mismatch be restricted to 5 nucleotides from either end, for example 5, 4, 3, 2, or 1 nucleotide from either the 5′ or 3′ end of the region of complementarity. For example, for a 23 nucleotide dsRNA strand which is complementary to a region of the PCSK9 gene, the dsRNA generally does not contain any mismatch within the central 13 nucleotides. The methods described within the invention can be used to determine whether a dsRNA containing a mismatch to a target sequence is effective in inhibiting the expression of the PCSK9 gene. Consideration of the efficacy of dsRNAs with mismatches in inhibiting expression of the PCSK9 gene is important, especially if the particular region of complementarity in the PCSK9 gene is known to have polymorphic sequence variation within the population.

[0064] In one embodiment, at least one end of the dsRNA has a single-stranded nucleotide overhang of 1 to 4, generally 1 or 2 nucleotides. dsRNAs having at least one nucleotide overhang have unexpectedly superior inhibitory properties than their blunt-ended counterparts. Moreover, the present inventors have discovered that the presence of only one nucleotide overhang strengthens the interference activity of the dsRNA, without affecting its overall stability. dsRNA having only one overhang has proven particularly stable and effective in vivo, as well as in a variety of cells, cell culture mediums, blood, and serum. Generally, the single-stranded overhang is located at the 3′-terminal end of the antisense strand or, alternatively, at the 3′-terminal end of the sense strand. The dsRNA may also have a blunt end, generally located at the 5′-end of the antisense strand. Such dsRNAs have improved stability and inhibitory activity, thus allowing administration at low dosages, i.e., less than 5 mg/kg body weight of the recipient per day. Generally, the antisense strand of the dsRNA has a nucleotide overhang at the 3′-end, and the 5′-end is blunt. In another embodiment, one or more of the nucleotides in the overhang is replaced with a nucleoside thiophosphate.

[0065] In yet another embodiment, the dsRNA is chemically modified to enhance stability. The nucleic acids of the invention may be synthesized and/or modified by methods well established in the art, such as those described in “Current protocols in nucleic acid chemistry”, Beaucage, S. L. et al. (Edrs.), John Wiley & Sons, Inc., New York, NY, USA, which is hereby incorporated herein by reference. Chemical modifications may include, but are not limited to 2′ modifications, modifications at other sites of the sugar or base of an oligonucleotide, introduction of non-natural bases into the olibonucleotide chain, covalent attachment to a ligand or chemical moiety, and replacement of internucleotide phosphate linkages with alternate linkages such as thiophosphates. More than one such modification may be employed.

[0066] Chemical linking of the two separate dsRNA strands may be achieved by any of a variety of well-known techniques, for example by introducing covalent, ionic or hydrogen bonds; hydrophobic interactions, van der Waals or stacking interactions; by means of metal-ion coordination, or through use of purine analogues. Generally, the chemical groups that can be used to modify the dsRNA include, without limitation, methylene blue; bifunctional groups, generally bis-(2-chloroethyl)amine; N-acetyl-N′-(p-glyoxylbenzoyl)cystamine; 4-thiouracil; and psoralen. In one embodiment, the linker is a hexa-ethylene glycol linker In this case, the dsRNA are produced by solid phase synthesis and the hexa-ethylene glycol linker is incorporated according to standard methods (e.g., Williams, D. J., and K. B. Hall, Biochem. (1996) 35:14665-14670). In a particular embodiment, the 5′-end of the antisense strand and the 3′-end of the sense strand are chemically linked via a hexaethylene glycol linker In another embodiment, at least one nucleotide of the dsRNA comprises a phosphorothioate or phosphorodithioate groups. The chemical bond at the ends of the dsRNA is generally formed by triple-helix bonds. Tables 1 and 2 provides examples of modified RNAi agents of the invention.

[0067] In yet another embodiment, the nucleotides at one or both of the two single strands may be modified to prevent or inhibit the degradation activities of cellular enzymes, such as, for example, without limitation, certain nucleases. Techniques for inhibiting the degradation activity of cellular enzymes against nucleic acids are known in the art including, but not limited to, 2′-amino modifications, 2′-amino sugar modifications, 2′-F sugar modifications, 2′-F modifications, 2′-alkyl sugar modifications, uncharged backbone modifications, morpholino modifications, 2′-O-methyl modifications, and phosphoramidate (see, e.g., Wagner, Nat. Med. (1995) 1:1116-8). Thus, at least one 2′-hydroxyl group of the nucleotides on a dsRNA is replaced by a chemical group, generally by a 2′-amino or a 2′-methyl group. Also, at least one nucleotide may be modified to form a locked nucleotide. Such locked nucleotide contains a methylene bridge that connects the 2′-oxygen of ribose with the 4′-carbon of ribose. Oligonucleotides containing the locked nucleotide are described in Koshkin, A. A., et al., Tetrahedron (1998), 54: 3607-3630) and Obika, S. et al., Tetrahedron Lett. (1998), 39: 5401-5404). Introduction of a locked nucleotide into an oligonucleotide improves the affinity for complementary sequences and increases the melting temperature by several degrees (Braasch, D. A. and D. R. Corey, Chem. Biol. (2001), 8:1-7).

[0068] Conjugating a ligand to a dsRNA can enhance its cellular absorption as well as targeting to a particular tissue or uptake by specific types of cells such as liver cells. In certain instances, a hydrophobic ligand is conjugated to the dsRNA to facilitate direct permeation of the cellular membrane and or uptake across the liver cells. Alternatively, the ligand conjugated to the dsRNA is a substrate for receptor-mediated endocytosis. These approaches have been used to facilitate cell permeation of antisense oligonucleotides as well as dsRNA agents. For example, cholesterol has been conjugated to various antisense oligonucleotides resulting in compounds that are substantially more active compared to their non-conjugated analogs. See M. Manoharan Antisense & Nucleic Acid Drug Development 2002, 12, 103. Other lipophilic compounds that have been conjugated to oligonucleotides include 1-pyrene butyric acid, 1,3-bis-O-(hexadecyl)glycerol, and menthol. One example of a ligand for receptor-mediated endocytosis is folic acid. Folic acid enters the cell by folate-receptor-mediated endocytosis. dsRNA compounds bearing folic acid would be efficiently transported into the cell via the folate-receptor-mediated endocytosis. Li and coworkers report that attachment of folic acid to the 3′-terminus of an oligonucleotide resulted in an 8-fold increase in cellular uptake of the oligonucleotide. Li, S.; Deshmukh, H. M.; Huang, L. Pharm. Res. 1998, 15, 1540. Other ligands that have been conjugated to oligonucleotides include polyethylene glycols, carbohydrate clusters, cross-linking agents, porphyrin conjugates, delivery peptides and lipids such as cholesterol.

[0069] In certain instances, conjugation of a cationic ligand to oligonucleotides results in improved resistance to nucleases. Representative examples of cationic ligands are propylammonium and dimethylpropylammonium. Interestingly, antisense oligonucleotides were reported to retain their high binding affinity to mRNA when the cationic ligand was dispersed throughout the oligonucleotide. See M. Manoharan Antisense & Nucleic Acid Drug Development 2002, 12, 103 and references therein.

[0070] The ligand-conjugated dsRNA of the invention may be synthesized by the use of a dsRNA that bears a pendant reactive functionality, such as that derived from the attachment of a linking molecule onto the dsRNA. This reactive oligonucleotide may be reacted directly with commercially-available ligands, ligands that are synthesized bearing any of a variety of protecting groups, or ligands that have a linking moiety attached thereto. The methods of the invention facilitate the synthesis of ligand-conjugated dsRNA by the use of, in some preferred embodiments, nucleoside monomers that have been appropriately conjugated with ligands and that may further be attached to a solid-support material. Such ligand-nucleoside conjugates, optionally attached to a solid-support material, are prepared according to some preferred embodiments of the methods of the invention via reaction of a selected serum-binding ligand with a linking moiety located on the 5′ position of a nucleoside or oligonucleotide. In certain instances, an dsRNA bearing an aralkyl ligand attached to the 3′-terminus of the dsRNA is prepared by first covalently attaching a monomer building block to a controlled-pore-glass support via a long-chain aminoalkyl group. Then, nucleotides are bonded via standard solid-phase synthesis techniques to the monomer building-block bound to the solid support. The monomer building block may be a nucleoside or other organic compound that is compatible with solid-phase synthesis.

[0071] The dsRNA used in the conjugates of the invention may be conveniently and routinely made through the well-known technique of solid-phase synthesis. Equipment for such synthesis is sold by several vendors including, for example, Applied Biosystems (Foster City, CA). Any other means for such synthesis known in the art may additionally or alternatively be employed. It is also known to use similar techniques to prepare other oligonucleotides, such as the phosphorothioates and alkylated derivatives.

[0072] Teachings regarding the synthesis of particular modified oligonucleotides may be found in the following U.S. patents: U.S. Pat. Nos. 5,138,045 and 5,218,105, drawn to polyamine conjugated oligonucleotides; U.S. Pat. No. 5,212,295, drawn to monomers for the preparation of oligonucleotides having chiral phosphorus linkages; U.S. Pat. Nos. 5,378,825 and 5,541,307, drawn to oligonucleotides having modified backbones; U.S. Pat. No. 5,386,023, drawn to backbone-modified oligonucleotides and the preparation thereof through reductive coupling; U.S. Pat. No. 5,457,191, drawn to modified nucleobases based on the 3-deazapurine ring system and methods of synthesis thereof; U.S. Pat. No. 5,459,255, drawn to modified nucleobases based on N-2 substituted purines; U.S. Pat. No. 5,521,302, drawn to processes for preparing oligonucleotides having chiral phosphorus linkages; U.S. Pat. No. 5,539,082, drawn to peptide nucleic acids; U.S. Pat. No. 5,554,746, drawn to oligonucleotides having β-lactam backbones; U.S. Pat. No. 5,571,902, drawn to methods and materials for the synthesis of oligonucleotides; U.S. Pat. No. 5,578,718, drawn to nucleosides having alkylthio groups, wherein such groups may be used as linkers to other moieties attached at any of a variety of positions of the nucleoside; U.S. Pat. Nos. 5,587,361 and 5,599,797, drawn to oligonucleotides having phosphorothioate linkages of high chiral purity; U.S. Pat. No. 5,506,351, drawn to processes for the preparation of 2′-O-alkyl guanosine and related compounds, including 2,6-diaminopurine compounds; U.S. Pat. No. 5,587,469, drawn to oligonucleotides having N-2 substituted purines; U.S. Pat. No. 5,587,470, drawn to oligonucleotides having 3-deazapurines; U.S. Pat. Nos. 5,223,168, and 5,608,046, both drawn to conjugated 4′-desmethyl nucleoside analogs; U.S. Pat. Nos. 5,602,240, and 5,610,289, drawn to backbone-modified oligonucleotide analogs; U.S. Pat. Nos. 6,262,241, and 5,459,255, drawn to, inter alia, methods of synthesizing 2′-fluoro-oligonucleotides.

[0073] In the ligand-conjugated dsRNA and ligand-molecule bearing sequence-specific linked nucleosides of the invention, the oligonucleotides and oligonucleosides may be assembled on a suitable DNA synthesizer utilizing standard nucleotide or nucleoside precursors, or nucleotide or nucleoside conjugate precursors that already bear the linking moiety, ligand-nucleotide or nucleoside-conjugate precursors that already bear the ligand molecule, or non-nucleoside ligand-bearing building blocks.

[0074] When using nucleotide-conjugate precursors that already bear a linking moiety, the synthesis of the sequence-specific linked nucleosides is typically completed, and the ligand molecule is then reacted with the linking moiety to form the ligand-conjugated oligonucleotide. Oligonucleotide conjugates bearing a variety of molecules such as steroids, vitamins, lipids and reporter molecules, has previously been described (see Manoharan et al., PCT Application WO 93/07883). In a preferred embodiment, the oligonucleotides or linked nucleosides of the invention are synthesized by an automated synthesizer using phosphoramidites derived from ligand-nucleoside conjugates in addition to the standard phosphoramidites and non-standard phosphoramidites that are commercially available and routinely used in oligonucleotide synthesis.

[0075] The incorporation of a 2′-O-methyl, 2′-O-ethyl, 2′-O-propyl, 2′-O-allyl, 2′-O-aminoalkyl or 2′-deoxy-2′-fluoro group in nucleosides of an oligonucleotide confers enhanced hybridization properties to the oligonucleotide. Further, oligonucleotides containing phosphorothioate backbones have enhanced nuclease stability. Thus, functionalized, linked nucleosides of the invention can be augmented to include either or both a phosphorothioate backbone or a 2′-O-methyl, 2′-O-ethyl, 2′-O-propyl, 2′-O-aminoalkyl, 2′-O-allyl or 2′-deoxy-2′-fluoro group. A summary listing of some of the oligonucleotide modifications known in the art is found at, for example, PCT Publication WO 200370918.

[0076] In some embodiments, functionalized nucleoside sequences of the invention possessing an amino group at the 5′-terminus are prepared using a DNA synthesizer, and then reacted with an active ester derivative of a selected ligand. Active ester derivatives are well known to those skilled in the art. Representative active esters include N-hydrosuccinimide esters, tetrafluorophenolic esters, pentafluorophenolic esters and pentachlorophenolic esters. The reaction of the amino group and the active ester produces an oligonucleotide in which the selected ligand is attached to the 5′-position through a linking group. The amino group at the 5′-terminus can be prepared utilizing a 5′-Amino-Modifier C6 reagent. In one embodiment, ligand molecules may be conjugated to oligonucleotides at the 5′-position by the use of a ligand-nucleoside phosphoramidite wherein the ligand is linked to the 5′-hydroxy group directly or indirectly via a linker Such ligand-nucleoside phosphoramidites are typically used at the end of an automated synthesis procedure to provide a ligand-conjugated oligonucleotide bearing the ligand at the 5′-terminus.

[0077] Examples of modified internucleoside linkages or backbones include, for example, phosphorothioates, chiral phosphorothioates, phosphorodithioates, phosphotriesters, aminoalkylphosphotriesters, methyl and other alkyl phosphonates including 3′-alkylene phosphonates and chiral phosphonates, phosphinates, phosphoramidates including 3′-amino phosphoramidate and aminoalkylphosphoramidates, thionophosphoramidates, thionoalkylphosphonates, thionoalkylphosphotriesters, and boranophosphates having normal 3′-5′ linkages, 2′-5′ linked analogs of these, and those having inverted polarity wherein the adjacent pairs of nucleoside units are linked 3′-5′ to 5′-3′ or 2′-5′ to 5′-2′. Various salts, mixed salts and free-acid forms are also included.

[0078] Representative United States Patents relating to the preparation of the above phosphorus-atom-containing linkages include, but are not limited to, U.S. Pat. Nos. 3,687,808; 4,469,863; 4,476,301; 5,023,243; 5,177,196; 5,188,897; 5,264,423; 5,276,019; 5,278,302; 5,286,717; 5,321,131; 5,399,676; 5,405,939; 5,453,496; 5,455,233; 5,466,677; 5,476,925; 5,519,126; 5,536,821; 5,541,306; 5,550,111; 5,563,253; 5,571,799; 5,587,361; 5,625,050; and 5,697,248, each of which is herein incorporated by reference.

[0079] Examples of modified internucleoside linkages or backbones that do not include a phosphorus atom therein (i.e., oligonucleosides) have backbones that are formed by short chain alkyl or cycloalkyl intersugar linkages, mixed heteroatom and alkyl or cycloalkyl intersugar linkages, or one or more short chain heteroatomic or heterocyclic intersugar linkages. These include those having morpholino linkages (formed in part from the sugar portion of a nucleoside); siloxane backbones; sulfide, sulfoxide and sulfone backbones; formacetyl and thioformacetyl backbones; methylene formacetyl and thioformacetyl backbones; alkene containing backbones; sulfamate backbones; methyleneimino and methylenehydrazino backbones; sulfonate and sulfonamide backbones; amide backbones; and others having mixed N, O, S and CH₂ component parts.

[0080] Representative United States patents relating to the preparation of the above oligonucleosides include, but are not limited to, U.S. Pat. Nos. 5,034,506; 5,166,315; 5,185,444; 5,214,134; 5,216,141; 5,235,033; 5,264,562; 5,264,564; 5,405,938; 5,434,257; 5,466,677; 5,470,967; 5,489,677; 5,541,307; 5,561,225; 5,596,086; 5,602,240; 5,610,289; 5,602,240; 5,608,046; 5,610,289; 5,618,704; 5,623,070; 5,663,312; 5,633,360; 5,677,437; and 5,677,439, each of which is herein incorporated by reference.

[0081] In certain instances, the oligonucleotide may be modified by a non-ligand group. A number of non-ligand molecules have been conjugated to oligonucleotides in order to enhance the activity, cellular distribution or cellular uptake of the oligonucleotide, and procedures for performing such conjugations are available in the scientific literature. Such non-ligand moieties have included lipid moieties, such as cholesterol (Letsinger et al., Proc. Natl. Acad. Sci. USA, 1989, 86:6553), cholic acid (Manoharan et al., Bioorg. Med. Chem. Lett., 1994, 4:1053), a thioether, e.g., hexyl-S-tritylthiol (Manoharan et al., Ann. N.Y. Acad. Sci., 1992, 660:306; Manoharan et al., Bioorg. Med. Chem. Let., 1993, 3:2765), a thiocholesterol (Oberhauser et al., Nucl. Acids Res., 1992, 20:533), an aliphatic chain, e.g., dodecandiol or undecyl residues (Saison-Behmoaras et al., EMBO J., 1991, 10:111; Kabanov et al., FEBS Lett., 1990, 259:327; Svinarchuk et al., Biochimie, 1993, 75:49), a phospholipid, e.g., di-hexadecyl-rac-glycerol or triethylammonium 1,2-di-O-hexadecyl-rac-glycero-3-H-phosphonate (Manoharan et al., Tetrahedron Lett., 1995, 36:3651; Shea et al., Nucl. Acids Res., 1990, 18:3777), a polyamine or a polyethylene glycol chain (Manoharan et al., Nucleosides & Nucleotides, 1995, 14:969), or adamantane acetic acid (Manoharan et al., Tetrahedron Lett., 1995, 36:3651), a palmityl moiety (Mishra et al., Biochim. Biophys. Acta, 1995, 1264:229), or an octadecylamine or hexylamino-carbonyl-oxycholesterol moiety (Crooke et al., J. Pharmacol. Exp. Ther., 1996, 277:923). Representative United States patents that teach the preparation of such oligonucleotide conjugates have been listed above. Typical conjugation protocols involve the synthesis of oligonucleotides bearing an aminolinker at one or more positions of the sequence. The amino group is then reacted with the molecule being conjugated using appropriate coupling or activating reagents. The conjugation reaction may be performed either with the oligonucleotide still bound to the solid support or following cleavage of the oligonucleotide in solution phase. Purification of the oligonucleotide conjugate by HPLC typically affords the pure conjugate. The use of a cholesterol conjugate is particularly preferred since such a moiety can increase targeting liver cells cells, a site of PCSK9 expression.

### Vector Encoded RNAi Agents

[0082] The dsRNA of the invention can also be expressed from recombinant viral vectors intracellularly in vivo. The recombinant viral vectors of the invention comprise sequences encoding the dsRNA of the invention and any suitable promoter for expressing the dsRNA sequences. Suitable promoters include, for example, the U6 or H1 RNA pol III promoter sequences and the cytomegalovirus promoter. Selection of other suitable promoters is within the skill in the art. The recombinant viral vectors of the invention can also comprise inducible or regulatable promoters for expression of the dsRNA in a particular tissue or in a particular intracellular environment. The use of recombinant viral vectors to deliver dsRNA of the invention to cells in vivo is discussed in more detail below.

[0083] dsRNA of the invention can be expressed from a recombinant viral vector either as two separate, complementary RNA molecules, or as a single RNA molecule with two complementary regions.

[0084] Any viral vector capable of accepting the coding sequences for the dsRNA molecule(s) to be expressed can be used, for example vectors derived from adenovirus (AV); adeno-associated virus (AAV); retroviruses (e.g, lentiviruses (LV), Rhabdoviruses, murine leukemia virus); herpes virus, and the like. The tropism of viral vectors can be modified by pseudotyping the vectors with envelope proteins or other surface antigens from other viruses, or by substituting different viral capsid proteins, as appropriate.

[0085] For example, lentiviral vectors of the invention can be pseudotyped with surface proteins from vesicular stomatitis virus (VSV), rabies, Ebola, Mokola, and the like. AAV vectors of the invention can be made to target different cells by engineering the vectors to express different capsid protein serotypes. For example, an AAV vector expressing a serotype 2 capsid on a serotype 2 genome is called AAV 2/2. This serotype 2 capsid gene in the AAV 2/2 vector can be replaced by a serotype 5 capsid gene to produce an AAV 2/5 vector. Techniques for constructing AAV vectors which express different capsid protein serotypes are within the skill in the art; see, e.g., Rabinowitz J E et al. (2002), J Virol 76:791-801, the entire disclosure of which is herein incorporated by reference.

[0086] Selection of recombinant viral vectors suitable for use in the invention, methods for inserting nucleic acid sequences for expressing the dsRNA into the vector, and methods of delivering the viral vector to the cells of interest are within the skill in the art. See, for example, Dornburg R (1995), Gene Therap. 2: 301-310; Eglitis M A (1988), Biotechniques 6: 608-614; Miller A D (1990), Hum Gene Therap. 1: 5-14; Anderson W F (1998), Nature 392: 25-30; and Rubinson D A et al., Nat. Genet. 33: 401-406, the entire disclosures of which are herein incorporated by reference.

[0087] Preferred viral vectors are those derived from AV and AAV. In a particularly preferred embodiment, the dsRNA of the invention is expressed as two separate, complementary single-stranded RNA molecules from a recombinant AAV vector comprising, for example, either the U6 or H1 RNA promoters, or the cytomegalovirus (CMV) promoter.

[0088] A suitable AV vector for expressing the dsRNA of the invention, a method for constructing the recombinant AV vector, and a method for delivering the vector into target cells, are described in Xia H et al. (2002), Nat. Biotech. 20: 1006-1010.

[0089] Suitable AAV vectors for expressing the dsRNA of the invention, methods for constructing the recombinant AV vector, and methods for delivering the vectors into target cells are described in Samulski R et al. (1987), J. Virol. 61: 3096-3101; Fisher K J et al. (1996), J. Virol, 70: 520-532; Samulski R et al. (1989), J. Virol. 63: 3822-3826; U.S. Pat. Nos. 5,252,479; 5,139,941; International Patent Application No. WO 94/13788; and International Patent Application No. WO 93/24641, the entire disclosures of which are herein incorporated by reference.

### III. Pharmaceutical Compositions Comprising dsRNA

[0090] In one embodiment, the invention provides pharmaceutical compositions comprising a dsRNA, as described herein, and a pharmaceutically acceptable carrier. The pharmaceutical composition comprising the dsRNA is useful for treating a disease or disorder associated with the expression or activity of the PCSK9 gene, such as pathological processes which can be mediated by down regulating PCSK9 gene expression, such as hyperlipidemia. Such pharmaceutical compositions are formulated based on the mode of delivery. One example is compositions that are formulated for delivery to the liver via parenteral delivery.

[0091] The pharmaceutical compositions of the invention are administered in dosages sufficient to inhibit expression of the PCSK9 gene. The present inventors have found that, because of their improved efficiency, compositions comprising the dsRNA of the invention can be administered at surprisingly low dosages. A dosage of 5 mg dsRNA per kilogram body weight of recipient per day is sufficient to inhibit or suppress expression of the PCSK9 gene and may be administered systemically to the patient.

[0092] In general, a suitable dose of dsRNA will be in the range of 0.01 to 5 0 milligrams per kilogram body weight of the recipient per day, generally in the range of 1 microgram to 1 mg per kilogram body weight per day. The pharmaceutical composition may be administered once daily, or the dsRNA may be administered as two, three, or more sub-doses at appropriate intervals throughout the day or even using continuous infusion or delivery through a controlled release formulation. In that case, the dsRNA contained in each sub-dose must be correspondingly smaller in order to achieve the total daily dosage. The dosage unit can also be compounded for delivery over several days, e.g., using a conventional sustained release formulation which provides sustained release of the dsRNA over a several day period. Sustained release formulations are well known in the art.

[0093] The skilled artisan will appreciate that certain factors may influence the dosage and timing required to effectively treat a subject, including but not limited to the severity of the disease or disorder, previous treatments, the general health and/or age of the subject, and other diseases present. Moreover, treatment of a subject with a therapeutically effective amount of a composition can include a single treatment or a series of treatments. Estimates of effective dosages and in vivo half-lives for the individual dsRNAs encompassed by the invention can be made using conventional methodologies or on the basis of in vivo testing using an appropriate animal model, as described elsewhere herein.

[0094] Advances in mouse genetics have generated a number of mouse models for the study of various human diseases, such as pathological processes which can be mediated by down regulating PCSK9 gene expression. Such models are used for in vivo testing of dsRNA, as well as for determining a therapeutically effective dose.

[0095] Any method can be used to administer a dsRNA of the present invention to a mammal For example, administration can be direct; oral; or parenteral (e.g., by subcutaneous, intraventricular, intramuscular, or intraperitoneal injection, or by intravenous drip). Administration can be rapid (e.g., by injection), or can occur over a period of time (e.g., by slow infusion or administration of slow release formulations).

[0096] Typically, when treating a mammal with hyperlipidemia, the dsRNA molecules are administered systemically via parental means. For example, dsRNAs, conjugated or unconjugated or formulated with or without liposomes, can be administered intravenously to a patient. For such, a dsRNA molecule can be formulated into compositions such as sterile and non-sterile aqueous solutions, non-aqueous solutions in common solvents such as alcohols, or solutions in liquid or solid oil bases. Such solutions also can contain buffers, diluents, and other suitable additives. For parenteral, intrathecal, or intraventricular administration, a dsRNA molecule can be formulated into compositions such as sterile aqueous solutions, which also can contain buffers, diluents, and other suitable additives (e.g., penetration enhancers, carrier compounds, and other pharmaceutically acceptable carriers).

[0097] In addition, dsRNA molecules can be administered to a mammal as biologic or abiologic means as described in, for example, U.S. Pat. No. 6,271,359. Abiologic delivery can be accomplished by a variety of methods including, without limitation, (1) loading liposomes with a dsRNA acid molecule provided herein and (2) complexing a dsRNA molecule with lipids or liposomes to form nucleic acid-lipid or nucleic acid-liposome complexes. The liposome can be composed of cationic and neutral lipids commonly used to transfect cells in vitro. Cationic lipids can complex (e.g., charge-associate) with negatively charged nucleic acids to form liposomes. Examples of cationic liposomes include, without limitation, lipofectin, lipofectamine, lipofectace, and DOTAP. Procedures for forming liposomes are well known in the art. Liposome compositions can be formed, for example, from phosphatidylcholine, dimyristoyl phosphatidylcholine, dipalmitoyl phosphatidylcholine, dimyristoyl phosphatidylglycerol, or dioleoyl phosphatidylethanolamine Numerous lipophilic agents are commercially available, including Lipofectin® (Invitrogen/Life Technologies, Carlsbad, Calif.) and Effectene™ (Qiagen, Valencia, Calif.). In addition, systemic delivery methods can be optimized using commercially available cationic lipids such as DDAB or DOTAP, each of which can be mixed with a neutral lipid such as DOPE or cholesterol. In some cases, liposomes such as those described by Templeton et al. (Nature Biotechnology, 15: 647-652 (1997)) can be used. In other embodiments, polycations such as polyethyleneimine can be used to achieve delivery in vivo and ex vivo (Boletta et al., J. Am Soc. Nephrol. 7: 1728 (1996)). Additional information regarding the use of liposomes to deliver nucleic acids can be found in U.S. Pat. No. 6,271,359, PCT Publication WO 96/40964 and Morrissey, D. et al. 2005. Nat Biotechnol. 23(8):1002-7.

[0098] Biologic delivery can be accomplished by a variety of methods including, without limitation, the use of viral vectors. For example, viral vectors (e.g., adenovirus and herpesvirus vectors) can be used to deliver dsRNA molecules to liver cells. Standard molecular biology techniques can be used to introduce one or more of the dsRNAs provided herein into one of the many different viral vectors previously developed to deliver nucleic acid to cells. These resulting viral vectors can be used to deliver the one or more dsRNAs to cells by, for example, infection.

[0099] dsRNAs of the present invention can be formulated in a pharmaceutically acceptable carrier or diluent. A “pharmaceutically acceptable carrier” (also referred to herein as an “excipient”) is a pharmaceutically acceptable solvent, suspending agent, or any other pharmacologically inert vehicle. Pharmaceutically acceptable carriers can be liquid or solid, and can be selected with the planned manner of administration in mind so as to provide for the desired bulk, consistency, and other pertinent transport and chemical properties. Typical pharmaceutically acceptable carriers include, by way of example and not limitation: water; saline solution; binding agents (e.g., polyvinylpyrrolidone or hydroxypropyl methylcellulose); fillers (e.g., lactose and other sugars, gelatin, or calcium sulfate); lubricants (e.g., starch, polyethylene glycol, or sodium acetate); disintegrates (e.g., starch or sodium starch glycolate); and wetting agents (e.g., sodium lauryl sulfate).

[0100] In addition, dsRNA that target the PCSK9 gene can be formulated into compositions containing the dsRNA admixed, encapsulated, conjugated, or otherwise associated with other molecules, molecular structures, or mixtures of nucleic acids. For example, a composition containing one or more dsRNA agents that target the PCSK9 gene can contain other therapeutic agents such as other lipid lowering agents (e.g., statins).

### Methods for Treating Diseases That Can Be Modulated by Down Regulating the Expression of PCSK9

[0101] The methods and compositions described herein can be used to treat diseases and conditions that can be modulated by down regulating PCSK9 gene expression. For example, the compositions described herein can be used to treat hyperlipidemia and other forms of lipid imbalance such as hypercholesterolemia, hypertriglyceridemia and the pathological conditions associated with these disorders such as heart and circulatory diseases.

### Methods for Inhibiting Expression of the PCSK9 Gene

[0102] In yet another aspect, the invention provides a method for inhibiting the expression of the PCSK9 gene in a mammal The method comprises administering a composition of the invention to the mammal such that expression of the target PCSK9 gene is silenced. Because of their high specificity, the dsRNAs of the invention specifically target RNAs (primary or processed) of the target PCSK9 gene. Compositions and methods for inhibiting the expression of these PCSK9 genes using dsRNAs can be performed as described elsewhere herein.

[0103] In one embodiment, the method comprises administering a composition comprising a dsRNA, wherein the dsRNA comprises a nucleotide sequence which is complementary to at least a part of an RNA transcript of the PCSK9 gene of the mammal to be treated. When the organism to be treated is a mammal such as a human, the composition may be administered by any means known in the art including, but not limited to oral or parenteral routes, including intravenous, intramuscular, subcutaneous, transdermal, airway (aerosol) administration. In preferred embodiments, the compositions are administered by intravenous infusion or injection.

[0104] Unless otherwise defined, all technical and scientific terms used herein have the same meaning as commonly understood by one of ordinary skill in the art to which this invention belongs. Although methods and materials similar or equivalent to those described herein can be used in the practice or testing of the invention, suitable methods and materials are described below. All publications, patent applications, patents, and other references mentioned herein are incorporated by reference in their entirety. In case of conflict, the present specification, including definitions, will control. In addition, the materials, methods, and examples are illustrative only and not intended to be limiting.

### EXAMPLES

### Gene Walking of the PCSK9 Gene

[0105] siRNA design was carried out to identify in two separate selections
[0106] a) siRNAs targeting PCSK9 human and either mouse or rat mRNA and
[0107] b) all human reactive siRNAs with predicted specificity to the target gene PCSK9.

[0108] mRNA sequences to human, mouse and rat PCSK9 were used: Human sequence NM_174936.2 was used as reference sequence during the complete siRNA selection procedure.

[0109] 19 mer stretches conserved in human and mouse, and human and rat PCSK9 mRNA sequences were identified in the first step, resulting in the selection of siRNAs crossreactive to human and mouse, and siRNAs crossreactive to human and rat targets

[0110] SiRNAs specifically targeting human PCSK9 were identified in a second selection. All potential 19mer sequences of human PCSK9 were extracted and defined as candidate target sequences. Sequences cross-reactive to human, monkey, and those cross-reactive to mouse, rat, human and monkey are all listed in Tables 1 and 2. Chemically modified versions of those sequences and their activity in both in vitro and in vivo assays are also listed in tables 1 and 2 and examples given in FIGS. 2-8.

[0111] In order to rank candidate target sequences and their corresponding siRNAs and select appropriate ones, their predicted potential for interacting with irrelevant targets (off-target potential) was taken as a ranking parameter. siRNAs with low off-target potential were defined as preferable and assumed to be more specific in vivo.

[0112] For predicting siRNA-specific off-target potential, the following assumptions were made:
[0113] 1) positions 2 to 9 (counting 5′ to 3′) of a strand (seed region) may contribute more to off-target potential than rest of sequence (non-seed and cleavage site region)
[0114] 2) positions 10 and 11 (counting 5′ to 3′) of a strand (cleavage site region) may contribute more to off-target potential than non-seed region
[0115] 3) positions 1 and 19 of each strand are not relevant for off-target interactions
[0116] 4) an off-target score can be calculated for each gene and each strand, based on complementarity of siRNA strand sequence to the gene's sequence and position of mismatches
[0117] 5) number of predicted off-targets as well as highest off-target score must be considered for off-target potential
[0118] 6) off-target scores are to be considered more relevant for off-target potential than numbers of off-targets
[0119] 7) assuming potential abortion of sense strand activity by internal modifications introduced, only off-target potential of antisense strand will be relevant

[0120] To identify potential off-target genes, 19mer candidate sequences were subjected to a homology search against publically available human mRNA sequences.

[0121] The following off-target properties for each 19mer input sequence were extracted for each off-target gene to calculate the off-target score:
[0122] Number of mismatches in non-seed region
[0123] Number of mismatches in seed region
[0124] Number of mismatches in cleavage site region
[0125] The off-target score was calculated for considering assumption 1 to 3 as follows:

Off-target score=number of seed mismatches*10+number of cleavage site mismatches*1.2+number of non-seed mismatches*1

[0126] The most relevant off-target gene for each siRNA corresponding to the input 19mer sequence was defined as the gene with the lowest off-target score. Accordingly, the lowest off-target score was defined as the relevant off-target score for each siRNA.

### dsRNA Synthesis

### Source of Reagents

[0127] Where the source of a reagent is not specifically given herein, such reagent may be obtained from any supplier of reagents for molecular biology at a quality/purity standard for application in molecular biology.

### siRNA Synthesis

[0128] Single-stranded RNAs were produced by solid phase synthesis on a scale of 1 mole using an Expedite 8909 synthesizer (Applied Biosystems, Applera Deutschland GmbH, Darmstadt, Germany) and controlled pore glass (CPG, 500 Å, Proligo Biochemie GmbH, Hamburg, Germany) as solid support. RNA and RNA containing 2′-O-methyl nucleotides were generated by solid phase synthesis employing the corresponding phosphoramidites and 2′-O-methyl phosphoramidites, respectively (Proligo Biochemie GmbH, Hamburg, Germany). These building blocks were incorporated at selected sites within the sequence of the oligoribonucleotide chain using standard nucleoside phosphoramidite chemistry such as described in Current protocols in nucleic acid chemistry, Beaucage, S. L. et al. (Edrs.), John Wiley & Sons, Inc., New York, NY, USA. Phosphorothioate linkages were introduced by replacement of the iodine oxidizer solution with a solution of the Beaucage reagent (Chruachem Ltd, Glasgow, UK) in acetonitrile (1%). Further ancillary reagents were obtained from Mallinckrodt Baker (Griesheim, Germany).

[0129] Deprotection and purification of the crude oligoribonucleotides by anion exchange HPLC were carried out according to established procedures. Yields and concentrations were determined by UV absorption of a solution of the respective RNA at a wavelength of 260 nm using a spectral photometer (DU 640B, Beckman Coulter GmbH, UnterschleiBheim, Germany). Double stranded RNA was generated by mixing an equimolar solution of complementary strands in annealing buffer (20 mM sodium phosphate, pH 6.8; 100 mM sodium chloride), heated in a water bath at 85-90° C. for 3 minutes and cooled to room temperature over a period of 3-4 hours. The annealed RNA solution was stored at −20° C. until use.

[0130] For the synthesis of 3′-cholesterol-conjugated siRNAs (herein referred to as -Chol-3′), an appropriately modified solid support was used for RNA synthesis. The modified solid support was prepared as follows:

Diethyl-2-azabutane-1,4-dicarboxylate AA

[chemical structure]

[0131] A 4.7 M aqueous solution of sodium hydroxide (50 mL) was added into a stirred, ice-cooled solution of ethyl glycinate hydrochloride (32.19 g, 0.23 mole) in water (50 mL). Then, ethyl acrylate (23.1 g, 0.23 mole) was added and the mixture was stirred at room temperature until completion of the reaction was ascertained by TLC. After 19 h the solution was partitioned with dichloromethane (3×100 mL). The organic layer was dried with anhydrous sodium sulfate, filtered and evaporated. The residue was distilled to afford AA (28.8 g, 61%).

3-{Ethoxycarbonylmethyl-[6-(9H-fluoren-9-ylmethoxycarbonyl-amino)-hexanoyl]-amino}-propionic acid ethyl ester AB

[chemical structure]

[0132] Fmoc-6-amino-hexanoic acid (9.12 g, 25.83 mmol) was dissolved in dichloromethane (50 mL) and cooled with ice. Diisopropylcarbodiimde (3.25 g, 3.99 mL, 25.83 mmol) was added to the solution at 0° C. It was then followed by the addition of Diethyl-azabutane-1,4-dicarboxylate (5 g, 24.6 mmol) and dimethylamino pyridine (0.305 g, 2.5 mmol). The solution was brought to room temperature and stirred further for 6 h. Completion of the reaction was ascertained by TLC. The reaction mixture was concentrated under vacuum and ethyl acetate was added to precipitate diisopropyl urea. The suspension was filtered. The filtrate was washed with 5% aqueous hydrochloric acid, 5% sodium bicarbonate and water. The combined organic layer was dried over sodium sulfate and concentrated to give the crude product which was purified by column chromatography (50% EtOAC/Hexanes) to yield 11.87 g (88%) of AB.

3-[(6-Amino-hexanoyl)-ethoxycarbonylmethyl-amino]-propionic acid ethyl ester AC

[chemical structure]

[0133] 3-{Ethoxycarbonylmethyl-[6-(9H-fluoren-9-ylmethoxycarbonylamino)-hexanoyl]-amino}-propionic acid ethyl ester AB (11.5 g, 21 3 mmol) was dissolved in 20% piperidine in dimethylformamide at 0° C. The solution was continued stirring for 1 h. The reaction mixture was concentrated under vacuum, water was added to the residue, and the product was extracted with ethyl acetate. The crude product was purified by conversion into its hydrochloride salt.

3-({6-[17-(1,5-Dimethyl-hexyl)-10,13-dimethyl-2,3,4,7,8,9,10,11,12,13,14,15,16,17-tetradecahydro-1H-cyclopenta[a]phenanthren-3-yloxycarbonylamino]-hexanoyl}ethoxycarbonylmethyl-amino)-propionic acid ethyl ester AD

[chemical structure]

[0134] The hydrochloride salt of 3-[(6-Amino-hexanoyl)-ethoxycarbonylmethyl-amino]-propionic acid ethyl ester AC (4.7 g, 14.8 mmol) was taken up in dichloromethane. The suspension was cooled to 0° C. on ice. To the suspension diisopropylethylamine (3.87 g, 5.2 mL, 30 mmol) was added. To the resulting solution cholesteryl chloroformate (6.675 g, 14 8 mmol) was added. The reaction mixture was stirred overnight. The reaction mixture was diluted with dichloromethane and washed with 10% hydrochloric acid. The product was purified by flash chromatography (10.3 g, 92%).

1-{6-[17-(1,5-Dimethyl-hexyl)-10,13-dimethyl-2,3,4,7,8,9,10,11,12,13,14,15,16,17-tetradecahydro-1H-cyclopenta[a] phenanthren-3-yloxycarbonylamino]-hexanoyl}-4-oxo-pyrrolidine-3-carboxylic acid ethyl ester AE

[chemical structure]

[0135] Potassium t-butoxide (1.1 g, 9.8 mmol) was slurried in 30 mL of dry toluene. The mixture was cooled to 0° C. on ice and 5 g (6 6 mmol) of diester AD was added slowly with stirring within 20 mins. The temperature was kept below 5° C. during the addition. The stirring was continued for 30 mins at 0° C. and 1 mL of glacial acetic acid was added, immediately followed by 4 g of NaH₂PO₄·H₂O in 40 mL of water The resultant mixture was extracted twice with 100 mL of dichloromethane each and the combined organic extracts were washed twice with 10 mL of phosphate buffer each, dried, and evaporated to dryness. The residue was dissolved in 60 mL of toluene, cooled to 0° C. and extracted with three 50 mL portions of cold pH 9.5 carbonate buffer. The aqueous extracts were adjusted to pH 3 with phosphoric acid, and extracted with five 40 mL portions of chloroform which were combined, dried and evaporated to dryness. The residue was purified by column chromatography using 25% ethylacetate/hexane to afford 1.9 g of b-ketoester (39%).

[6-(3-Hydroxy-4-hydroxymethyl-pyrrolidin-1-yl)-6-oxo-hexyl]-carbamic acid 17-(1,5-dimethyl-hexyl)-10,13-dimethyl-2,3,4,7,8,9,10,11,12,13,14,15,16,17-tetradecahydro-1H-cyclopenta[a]phenanthren-3-yl ester AF

[chemical structure]

[0136] Methanol (2 mL) was added dropwise over a period of 1 h to a refluxing mixture of b-ketoester AE (1.5 g, 2.2 mmol) and sodium borohydride (0.226 g, 6 mmol) in tetrahydrofuran (10 mL). Stirring was continued at reflux temperature for 1 h. After cooling to room temperature, 1 N HCl (12.5 mL) was added, the mixture was extracted with ethylacetate (3×40 mL). The combined ethylacetate layer was dried over anhydrous sodium sulfate and concentrated under vacuum to yield the product which was purified by column chromatography (10% MeOH/CHCl₃) (89%).

(6-{3-[Bis-(4-methoxy-phenyl)-phenyl-methoxymethyl]-4-hydroxy-pyrrolidin-1-yl}-6-oxo-hexyl)-carbamic acid 17-(1,5-dimethyl-hexyl)-10,13-dimethyl-2,3,4,7,8,9,10,11,12,13,14,15,16,17-tetradecahydro-1H-cyclopenta[a]phenanthren-3-yl ester AG

[chemical structure]

[0137] Diol AF (1.25 gm 1.994 mmol) was dried by evaporating with pyridine (2×5 mL) in vacuo. Anhydrous pyridine (10 mL) and 4,4′-dimethoxytritylchloride (0.724 g, 2.13 mmol) were added with stirring. The reaction was carried out at room temperature overnight. The reaction was quenched by the addition of methanol. The reaction mixture was concentrated under vacuum and to the residue dichloromethane (50 mL) was added. The organic layer was washed with 1M aqueous sodium bicarbonate. The organic layer was dried over anhydrous sodium sulfate, filtered and concentrated. The residual pyridine was removed by evaporating with toluene. The crude product was purified by column chromatography (2% MeOH/Chloroform, Rf=0.5 in 5% MeOH/CHCl₃) (1.75 g, 95%).

Succinic acid mono-(4-[bis-(4-methoxy-phenyl)-phenyl-methoxymethyl]-1-{6-[17-(1,5-dimethyl-hexyl)-10,13-dimethyl 2,3,4,7,8,9,10,11,12,13,14,15,16,17-tetradecahydro-1H cyclopenta[a]phenanthren-3-yloxycarbonylamino]-hexanoyl}-pyrrolidin-3-yl) ester AH

[chemical structure]

[0138] Compound AG (1.0 g, 1.05 mmol) was mixed with succinic anhydride (0.150 g, 1.5 mmol) and DMAP (0.073 g, 0.6 mmol) and dried in a vacuum at 40° C. overnight. The mixture was dissolved in anhydrous dichloroethane (3 mL), triethylamine (0.318 g, 0.440 mL, 3.15 mmol) was added and the solution was stirred at room temperature under argon atmosphere for 16 h. It was then diluted with dichloromethane (40 mL) and washed with ice cold aqueous citric acid (5 wt %, 30 mL) and water (2×20 mL). The organic phase was dried over anhydrous sodium sulfate and concentrated to dryness. The residue was used as such for the next step.

### Cholesterol Derivatised CPG AI

[chemical structure]

[0140] Succinate AH (0.254 g, 0.242 mmol) was dissolved in a mixture of dichloromethane/acetonitrile (3:2, 3 mL). To that solution DMAP (0.0296 g, 0.242 mmol) in acetonitrile (1.25 mL), 2,2′-Dithio-bis(5-nitropyridine) (0.075 g, 0.242 mmol) in acetonitrile/dichloroethane (3:1, 1.25 mL) were added successively. To the resulting solution triphenylphosphine (0.064 g, 0.242 mmol) in acetonitrile (0.6 ml) was added. The reaction mixture turned bright orange in color. The solution was agitated briefly using a wrist-action shaker (5 mins). Long chain alkyl amine-CPG (LCAA-CPG) (1.5 g, 61 mM) was added. The suspension was agitated for 2 h. The CPG was filtered through a sintered funnel and washed with acetonitrile, dichloromethane and ether successively. Unreacted amino groups were masked using acetic anhydride/pyridine. The achieved loading of the CPG was measured by taking UV measurement (37 mM/g).

[0141] The synthesis of siRNAs bearing a 5′-12-dodecanoic acid bisdecylamide group (herein referred to as “5′-C32-”) or a 5′-cholesteryl derivative group (herein referred to as “5′-Chol-”) was performed as described in WO 2004/065601, except that, for the cholesteryl derivative, the oxidation step was performed using the Beaucage reagent in order to introduce a phosphorothioate linkage at the 5′-end of the nucleic acid oligomer.

[0142] Nucleic acid sequences are represented below using standard nomenclature, and specifically the abbreviations of Table 1-2.

### PCSK9 siRNA Screening in HuH7, HepG2, Hela and Primary Monkey Hepatocytes Discovers Highly Active Sequences

[0143] HuH-7cells were obtained from JCRB Cell Bank (Japanese Collection of Research Bioresources) (Shinjuku, Japan, cat. No.: JCRB0403) Cells were cultured in Dulbecco's MEM (Biochrom AG, Berlin, Germany, cat. No. F0435) supplemented to contain 10% fetal calf serum (FCS) (Biochrom AG, Berlin, Germany, cat. No. S0115), Penicillin 100 U/ml, Streptomycin 100 μg/ml (Biochrom AG, Berlin, Germany, cat. No. A2213) and 2 mM L-Glutamin (Biochrom AG, Berlin, Germany, cat. No K0282) at 37° C. in an atmosphere with 5% CO₂ in a humidified incubator (Heraeus HERAcell, Kendro Laboratory Products, Langenselbold, Germany). HepG2 and Hela cells were obtained from American Type Culture Collection (Rockville, MD, cat. No. HB-8065) and cultured in MEM (Gibco Invitrogen, Karlsruhe, Germany, cat. No. 21090-022) supplemented to contain 10% fetal calf serum (FCS) (Biochrom AG, Berlin, Germany, cat. No. S0115), Penicillin 100 U/ml, Streptomycin 100 μg/ml (Biochrom AG, Berlin, Germany, cat. No. A2213), 1× Non Essential Amino Acids (Biochrom AG, Berlin, Germany, cat. No. K-0293), and 1 mM Sodium Pyruvate (Biochrom AG, Berlin, Germany, cat. No. L-0473) at 37° C. in an atmosphere with 5% CO₂ in a humidified incubator (Heraeus HERAcell, Kendro Laboratory Products, Langenselbold, Germany).

[0144] For transfection with siRNA, HuH7, HepG2, or Hela cells were seeded at a density of 2.0×10⁴ cells/well in 96-well plates and transfected directly. Transfection of siRNA (30 nM for single dose screen) was carried out with lipofectamine 2000 (Invitrogen GmbH, Karlsruhe, Germany, cat. No. 11668-019) as described by the manufacturer.

[0145] 24 hours after transfection HuH7 and HepG2 cells were lysed and PCSK9 mRNA levels were quantified with the Quantigene Explore Kit (Genosprectra, Dumbarton Circle Fremont, USA, cat. No. QG-000-02) according to the protocol. PCSK9 mRNA levels were normalized to GAP-DH mRNA. For each siRNA eight individual datapoints were collected. siRNA duplexes unrelated to PCSK9 gene were used as control. The activity of a given PCSK9 specific siRNA duplex was expressed as percent PCSK9 mRNA concentration in treated cells relative to PCSK9 mRNA concentration in cells treated with the control siRNA duplex.

[0146] Primary cynomolgus monkey hepatocytes (cryopreserved) were obtained from In vitro Technologies, Inc. (Baltimore, Maryland, USA, cat No M00305) and cultured in InVitroGRO CP Medium (cat No Z99029) at 37° C. in an atmosphere with 5% CO₂ in a humidified incubator.

[0147] For transfection with siRNA, primary cynomolgus monkey cells were seeded on Collagen coated plates (Fisher Scientific, cat. No. 08-774-5) at a density of 3.5×10⁴ cells/well in 96-well plates and transfected directly. Transfection of siRNA (eight 2-fold dilution series starting from 30 nM) in duplicates was carried out with lipofectamine 2000 (Invitrogen GmbH, Karlsruhe, Germany, cat. No. 11668-019) as described by the manufacturer.

[0148] 16 hours after transfection medium was changed to fresh InVitroGRO CP Medium with Torpedo Antibiotic Mix (In vitro Technologies, Inc, cat. No Z99000) added.

[0149] 24 hours after medium change primary cynomolgus monkey cells were lysed and PCSK9 mRNA levels were quantified with the Quantigene Explore Kit (Genosprectra, Dumbarton Circle Fremont, USA, cat. No. QG-000-02) according to the protocol. PCSK9 mRNA levels were normalized to GAPDH mRNA. Normalized PCSK9/GAPDH ratios were then compared to PCSK9/GAPDH ratio of lipofectamine 2000 only control.

[0150] Tables 1-2 (and FIG. 6) summarize the results and provides examples of in vitro screens in different cell lines at different doses. Silencing of PCSK9 transcript was expressed as percentage of remaining transcript at a given dose. Highly active sequences are those with less than 70% transcript remaining post treatment with a given siRNA at a dose less than or equal to 100 nm. Very active sequences are those that have less than 60% of transcript remaining after treatment with a dose. less than or equal to 100 nM. Active sequences are those that have less than 85% transcript remaining after treatment with a high dose (100 nM). Examples of active siRNA's were also screened in vivo in mouse in lipidoid formulations as described below. Active sequences in vitro were also generally active in vivo (See figure FIG. 6 example).

### In Vivo Efficacy Screen of PCSK9 siRNAs

### Formulation Procedure

[0151] The lipidoid LNP-01·4HCl (MW 1487) (FIG. 1), Cholesterol (Sigma-Aldrich), and PEG-Ceramide C16 (Avanti Polar Lipids) were used to prepare lipid-siRNA nanoparticles. Stock solutions of each in ethanol were prepared: LNP-01, 133 mg/mL; Cholesterol, 25 mg/mL, PEG-Ceramide C16, 100 mg/mL. LNP-01, Cholesterol, and PEG-Ceramide C16 stock solutions were then combined in a 42:48:10 molar ratio. Combined lipid solution was mixed rapidly with aqueous siRNA (in sodium acetate pH 5) such that the final ethanol concentration was 35-45% and the final sodium acetate concentration was 100-300 mM. Lipid-siRNA nanoparticles formed spontaneously upon mixing. Depending on the desired particle size distribution, the resultant nanoparticle mixture was in some cases extruded through a polycarbonate membrane (100 nm cut-off) using a thermobarrel extruder (Lipex Extruder, Northern Lipids, Inc). In other cases, the extrusion step was omitted. Ethanol removal and simultaneous buffer exchange was accomplished by either dialysis or tangential flow filtration. Buffer was exchanged to phosphate buffered saline (PBS) pH 7.2.

### Characterization of Formulations

[0152] Formulations prepared by either the standard or extrusion-free method are characterized in a similar manner. Formulations are first characterized by visual inspection. They should be whitish translucent solutions free from aggregates or sediment. Particle size and particle size distribution of lipid-nanoparticles are measured by dynamic light scattering using a Malvern Zetasizer Nano ZS (Malvern, USA). Particles should be 20-300 nm, and ideally, 40-100 nm in size. The particle size distribution should be unimodal. The total siRNA concentration in the formulation, as well as the entrapped fraction, is estimated using a dye exclusion assay. A sample of the formulated siRNA is incubated with the RNA-binding dye Ribogreen (Molecular Probes) in the presence or absence of a formulation disrupting surfactant, 0.5% Triton-X100. The total siRNA in the formulation is determined by the signal from the sample containing the surfactant, relative to a standard curve. The entrapped fraction is determined by subtracting the “free” siRNA content (as measured by the signal in the absence of surfactant) from the total siRNA content. Percent entrapped siRNA is typically >85%.

### Bolus Dosing

[0153] Bolus dosing of formulated siRNAs in C57/BL6 mice (5/group, 8-10 weeks old, Charles River Laboratories, MA) was performed by tail vein injection using a 27G needle. SiRNAs were formulated in LNP-01 (and then dialyzed against PBS) at 0.5 mg/ml concentration allowing the delivery of the 5 mg/kg dose in 10 μl/g body weight. Mice were kept under an infrared lamp for approximately 3 min prior to dosing to ease injection.

[0154] 48 hour post dosing mice were sacrificed by CO₂-asphyxiation. 0.2 ml blood was collected by retro-orbital bleeding and the liver was harvested and frozen in liquid nitrogen. Serum and livers were stored at −80° C.

[0155] Frozen livers were grinded using 6850 Freezer/Mill Cryogenic Grinder (SPEX CentriPrep, Inc) and powders stored at −80° C. until analysis.

[0156] PCSK9 mRNA levels were detected using the branched-DNA technology based kit from QuantiGene Reagent System (Genospectra) according to the protocol. 10-20 mg of frozen liver powders was lysed in 600 ul of 0.16 ug/ml Proteinase K (Epicentre, #MPRK092) in Tissue and Cell Lysis Solution (Epicentre, #MTC096H) at 65° C. for 3hours. Then 10 ul of the lysates were added to 90 ul of Lysis Working Reagent (1 volume of stock Lysis Mixture in two volumes of water) and incubated at 52° C. overnight on Genospectra capture plates with probe sets specific to mouse PCSK9 and mouse GAPDH or cyclophilin B. Nucleic acid sequences for Capture Extender (CE), Label Extender (LE) and blocking (BL) probes were selected from the nucleic acid sequences of PCSK9, GAPDH and cyclophilin B with the help of the QuantiGene ProbeDesigner Software 2.0 (Genospectra, Fremont, CA, USA, cat. No. QG-002-02). Chemo luminescence was read on a Victor2-Light (Perkin Elmer) as Relative light units. The ratio of PCSK9 mRNA to GAPDH or cyclophilin B mRNA in liver lysates was averaged over each treatment group and compared to a control group treated with PBS or a control group treated with an unrelated siRNA (blood coagulation factor VII).

[0157] Total serum cholesterol in mouse serum was measured using the StanBio Cholesterol LiquiColor kit (StanBio Laboratory, Boerne, Texas, USA) according to manufacturer's instructions. Measurements were taken on a Victor2 1420 Multilabel Counter (Perkin Elmer) at 495 nm.

### Examples

[0158] 32 PCSK9 siRNAs formulated in LNP-01 liposomes were tested in vivo in a mouse model. The experiment was performed at 5 mg/kg siRNA dose and at least 10 PCSK9 siRNAs showed more than 40% PCSK9 mRNA knock down compared to a control group treated with PBS, while control group treated with an unrelated siRNA (blood coagulation factor VII) had no effect (FIGS. 2-5). Silencing of PCSK9 transcript also coorelated with a lowering of cholesterol in these animals (FIGS. 4-5). In addition there was a strong coorelation between those molecules that were active in vitro and those active in vivo (FIG. 6). Sequences containing different chemical modifications were also screened in vitro (Tables 1 and 2) and in vivo. As an example, less modified sequences 9314 and 9318, and a more modified versions of that sequence 9314-(10792, 10793, and 10796); 9318-(10794, 10795, 10797) were tested both in vitro (In primary monkey hepatocytes) or in vivo (9314 and 10792) formulated in LNP-01. FIG. 7 (also see Tables 1 and 2) shows that the parent molecules 9314 and 9318 and the modified versions are all active in vitro. FIG. 8 as an example shows that both the parent 9314 and the more highly modified 10792 sequences are active in vivo displaying 50-60% silencing of endogenous PCSK9 in mice. FIG. 9 further exemplifies that activity of other chemically modified versions of the parents 9314 and 10792.

### dsRNA Expression Vectors

[0159] In another aspect of the invention, PCSK9 specific dsRNA molecules that modulate PCSK9 gene expression activity are expressed from transcription units inserted into DNA or RNA vectors (see, e.g., Couture, A, et al., TIG. (1996), 12:5-10; Skillern, A., et al., International PCT Publication No. WO 00/22113, Conrad, International PCT Publication No. WO 00/22114, and Conrad, U.S. Pat. No. 6,054,299). These transgenes can be introduced as a linear construct, a circular plasmid, or a viral vector, which can be incorporated and inherited as a transgene integrated into the host genome. The transgene can also be constructed to permit it to be inherited as an extrachromosomal plasmid (Gassmann, et al., Proc. Natl. Acad. Sci. USA (1995) 92:1292).

[0160] The individual strands of a dsRNA can be transcribed by promoters on two separate expression vectors and co-transfected into a target cell. Alternatively each individual strand of the dsRNA can be transcribed by promoters both of which are located on the same expression plasmid. In a preferred embodiment, a dsRNA is expressed as an inverted repeat joined by a linker polynucleotide sequence such that the dsRNA has a stem and loop structure.

[0161] The recombinant dsRNA expression vectors are generally DNA plasmids or viral vectors. dsRNA expressing viral vectors can be constructed based on, but not limited to, adeno-associated virus (for a review, see Muzyczka, et al., Curr. Topics Micro. Immunol. (1992) 158:97-129)); adenovirus (see, for example, Berkner, et al., BioTechniques (1998) 6:616), Rosenfeld et al. (1991, Science 252:431-434), and Rosenfeld et al. (1992), Cell 68:143-155)); or alphavirus as well as others known in the art. Retroviruses have been used to introduce a variety of genes into many different cell types, including epithelial cells, in vitro and/or in vivo (see, e.g., Eglitis, et al., Science (1985) 230:1395-1398; Danos and Mulligan, Proc. NatI. Acad. Sci. USA (1998) 85:6460-6464; Wilson et al., 1988, Proc. NatI. Acad. Sci. USA 85:3014-3018; Armentano et al., 1990, Proc. NatI. Acad. Sci. USA 87:61416145; Huber et al., 1991, Proc. NatI. Acad. Sci. USA 88:8039-8043; Ferry et al., 1991, Proc. NatI. Acad. Sci. USA 88:8377-8381; Chowdhury et al., 1991, Science 254:1802-1805; van Beusechem. et al., 1992, Proc. Nad. Acad. Sci. USA 89:7640-19; Kay et al., 1992, Human Gene Therapy 3:641-647; Dai et al., 1992, Proc. Natl. Acad. Sci. USA 89:10892-10895; Hwu et al., 1993, J. Immunol. 150:4104-4115; U.S. Pat. Nos. 4,868,116; 4,980,286; PCT Application WO 89/07136; PCT Application WO 89/02468; PCT Application WO 89/05345; and PCT Application WO 92/07573). Recombinant retroviral vectors capable of transducing and expressing genes inserted into the genome of a cell can be produced by transfecting the recombinant retroviral genome into suitable packaging cell lines such as PA317 and Psi-CRIP (Comette et al., 1991, Human Gene Therapy 2:5-10; Cone et al., 1984, Proc. Natl. Acad. Sci. USA 81:6349). Recombinant adenoviral vectors can be used to infect a wide variety of cells and tissues in susceptible hosts (e.g., rat, hamster, dog, and chimpanzee) (Hsu et al., 1992, J. Infectious Disease, 166:769), and also have the advantage of not requiring mitotically active cells for infection.

[0162] The promoter driving dsRNA expression in either a DNA plasmid or viral vector of the invention may be a eukaryotic RNA polymerase I (e.g. ribosomal RNA promoter), RNA polymerase II (e.g. CMV early promoter or actin promoter or U1 snRNA promoter) or generally RNA polymerase III promoter (e.g. U6 snRNA or 7SK RNA promoter) or a prokaryotic promoter, for example the T7 promoter, provided the expression plasmid also encodes T7 RNA polymerase required for transcription from a T7 promoter. The promoter can also direct transgene expression to the pancreas (see, e.g. the insulin regulatory sequence for pancreas (Bucchini et al., 1986, Proc. Natl. Acad. Sci. USA 83:2511-2515)).

[0163] In addition, expression of the transgene can be precisely regulated, for example, by using an inducible regulatory sequence and expression systems such as a regulatory sequence that is sensitive to certain physiological regulators, e.g., circulating glucose levels, or hormones (Docherty et al., 1994, FASEB J. 8:20-24). Such inducible expression systems, suitable for the control of transgene expression in cells or in mammals include regulation by ecdysone, by estrogen, progesterone, tetracycline, chemical inducers of dimerization, and isopropyl-beta-D1-thiogalactopyranoside (EPTG). A person skilled in the art would be able to choose the appropriate regulatory/promoter sequence based on the intended use of the dsRNA transgene.

[0164] Generally, recombinant vectors capable of expressing dsRNA molecules are delivered as described below, and persist in target cells. Alternatively, viral vectors can be used that provide for transient expression of dsRNA molecules. Such vectors can be repeatedly administered as necessary. Once expressed, the dsRNAs bind to target RNA and modulate its function or expression. Delivery of dsRNA expressing vectors can be systemic, such as by intravenous or intramuscular administration, by administration to target cells ex-planted from the patient followed by reintroduction into the patient, or by any other means that allows for introduction into a desired target cell.

[0165] dsRNA expression DNA plasmids are typically transfected into target cells as a complex with cationic lipid carriers (e.g. Oligofectamine) or non-cationic lipid-based carriers (e.g. Transit-TKO™). Multiple lipid transfections for dsRNA-mediated knockdowns targeting different regions of a single PCSK9 gene or multiple PCSK9 genes over a period of a week or more are also contemplated by the invention. Successful introduction of the vectors of the invention into host cells can be monitored using various known methods. For example, transient transfection. can be signaled with a reporter, such as a fluorescent marker, such as Green Fluorescent Protein (GFP). Stable transfection. of ex vivo cells can be ensured using markers that provide the transfected cell with resistance to specific environmental factors (e.g., antibiotics and drugs), such as hygromycin B resistance.

[0166] The PCSK9 specific dsRNA molecules can also be inserted into vectors and used as gene therapy vectors for human patients. Gene therapy vectors can be delivered to a subject by, for example, intravenous injection, local administration (see U.S. Pat. No. 5,328,470) or by stereotactic injection (see e.g., Chen et al. (1994) Proc. Natl. Acad. Sci. USA 91:3054-3057). The pharmaceutical preparation of the gene therapy vector can include the gene therapy vector in an acceptable diluent, or can comprise a slow release matrix in which the gene delivery vehicle is imbedded. Alternatively, where the complete gene delivery vector can be produced intact from recombinant cells, e.g., retroviral vectors, the pharmaceutical preparation can include one or more cells which produce the gene delivery system.

[0167] Those skilled in the art are familiar with methods and compositions in addition to those specifically set out in the instant disclosure which will allow them to practice this invention to the full scope of the claims hereinafter appended.

TABLE 1
sequences

| position | | | | | |
|---|---|---|---|---|---|
| in human | | SEQ | | SEQ | |
| access. # | | ID | | ID | Duplex |
| NM_174936 | Sense strand sequence (5′-3′)¹ | NO: | Antisense-strand sequence (5′-3′)¹ | NO: | name |
| 2-20 | AGCGACGUCGAGGCGCUCATT | 1 | UGAGCGCCUCGACGUCGCUTT | 2 | AD-15220 |
| 15-33 | CGCUCAUGGUUGCAGGCGGTT | 3 | CCGCCUGCAACCAUGAGCGTT | 4 | AD-15275 |
| 16-34 | GCUCAUGGUUGCAGGCGGGTT | 5 | CCCGCCUGCAACCAUGAGCTT | 6 | AD-15301 |
| 30-48 | GCGGGCGCCGCCGUUCAGUTT | 7 | ACUGAACGGCGGCGCCCGCTT | 8 | AD-15276 |
| 31-49 | CGGGCGCCGCCGUUCAGUUTT | 9 | AACUGAACGGCGGCGCCCGTT | 10 | AD-15302 |
| 32-50 | GGGCGCCGCCGUUCAGUUCTT | 11 | GAACUGAACGGCGGCGCCCTT | 12 | AD-15303 |
| 40-58 | CCGUUCAGUUCAGGGUCUGTT | 13 | CAGACCCUGAACUGAACGGTT | 14 | AD-15221 |
| 43-61 | UUCAGUUCAGGGUCUGAGCTT | 15 | GCUCAGACCCUGAACUGAATT | 16 | AD-15413 |
| 82-100 | GUGAGACUGGCUCGGGCGGTT | 17 | CCGCCCGAGCCAGUCUCACTT | 18 | AD-15304 |
| 100-118 | GGCCGGGACGCGUCGUUGCTT | 19 | GCAACGACGCGUCCCGGCCTT | 20 | AD-15305 |
| 101-119 | GCCGGGACGCGUCGUUGCATT | 21 | UGCAACGACGCGUCCCGGCTT | 22 | AD-15306 |
| 102-120 | CCGGGACGCGUCGUUGCAGTT | 23 | CUGCAACGACGCGUCCCGGTT | 24 | AD-15307 |
| 105-123 | GGACGCGUCGUUGCAGCAGTT | 25 | CUGCUGCAACGACGCGUCCTT | 26 | AD-15277 |
| 135-153 | UCCCAGCCAGGAUUCCGCGTsT | 27 | CGCGGAAUCCUGGCUGGGATsT | 28 | AD-9526 |
| 135-153 | ucccAGccAGGAuuccGcGTsT | 29 | CGCGGAAUCCUGGCUGGGATsT | 30 | AD-9652 |
| 136-154 | CCCAGCCAGGAUUCCGCGCTsT | 31 | GCGCGGAAUCCUGGCUGGGTsT | 32 | AD-9519 |
| 136-154 | cccAGccAGGAuuccGcGcTsT | 33 | GCGCGGAAUCCUGGCUGGGTsT | 34 | AD-9645 |
| 138-156 | CAGCCAGGAUUCCGCGCGCTsT | 35 | GCGCGCGGAAUCCUGGCUGTsT | 36 | AD-9523 |
| 138-156 | cAGccAGGAuuccGcGcGcTsT | 37 | GCGCGCGGAAUCCUGGCUGTsT | 38 | AD-9649 |
| 185-203 | AGCUCCUGCACAGUCCUCCTsT | 39 | GGAGGACUGUGCAGGAGCUTsT | 40 | AD-9569 |
| 185-203 | AGcuccuGcAcAGuccuccTsT | 41 | GGAGGACUGUGcAGGAGCUTsT | 42 | AD-9695 |
| 205-223 | CACCGCAAGGCUCAAGGCGTT | 43 | CGCCUUGAGCCUUGCGGUGTT | 44 | AD-15222 |
| 208-226 | CGCAAGGCUCAAGGCGCCGTT | 45 | CGGCGCCUUGAGCCUUGCGTT | 46 | AD-15278 |
| 210-228 | CAAGGCUCAAGGCGCCGCCTT | 47 | GGCGGCGCCUUGAGCCUUGTT | 48 | AD-15178 |
| 232-250 | GUGGACCGCGCACGGCCUCTT | 49 | GAGGCCGUGCGCGGUCCACTT | 50 | AD-15308 |
| 233-251 | UGGACCGCGCACGGCCUCUTT | 51 | AGAGGCCGUGCGCGGUCCATT | 52 | AD-15223 |
| 234-252 | GGACCGCGCACGGCCUCUATT | 53 | UAGAGGCCGUGCGCGGUCCTT | 54 | AD-15309 |
| 235-253 | GACCGCGCACGGCCUCUAGTT | 55 | CUAGAGGCCGUGCGCGGUCTT | 56 | AD-15279 |
| 236-254 | ACCGCGCACGGCCUCUAGGTT | 57 | CCUAGAGGCCGUGCGCGGUTT | 58 | AD-15194 |
| 237-255 | CCGCGCACGGCCUCUAGGUTT | 59 | ACCUAGAGGCCGUGCGCGGTT | 60 | AD-15310 |
| 238-256 | CGCGCACGGCCUCUAGGUCTT | 61 | GACCUAGAGGCCGUGCGCGTT | 62 | AD-15311 |
| 239-257 | GCGCACGGCCUCUAGGUCUTT | 63 | AGACCUAGAGGCCGUGCGCTT | 64 | AD-15392 |
| 240-258 | CGCACGGCCUCUAGGUCUCTT | 65 | GAGACCUAGAGGCCGUGCGTT | 66 | AD-15312 |
| 248-266 | CUCUAGGUCUCCUCGCCAGTT | 67 | CUGGCGAGGAGACCUAGAGTT | 68 | AD-15313 |
| 249-267 | UCUAGGUCUCCUCGCCAGGTT | 69 | CCUGGCGAGGAGACCUAGATT | 70 | AD-15280 |
| 250-268 | CUAGGUCUCCUCGCCAGGATT | 71 | UCCUGGCGAGGAGACCUAGTT | 72 | AD-15267 |
| 252-270 | AGGUCUCCUCGCCAGGACATT | 73 | UGUCCUGGCGAGGAGACCUTT | 74 | AD-15314 |
| 258-276 | CCUCGCCAGGACAGCAACCTT | 75 | GGUUGCUGUCCUGGCGAGGTT | 76 | AD-15315 |
| 300-318 | CGUCAGCUCCAGGCGGUCCTsT | 77 | GGACCGCCUGGAGCUGACGTsT | 78 | AD-9624 |
| 300-318 | cGucAGcuccAGGcGGuccTsT | 79 | GGACCGCCUGGAGCUGACGTsT | 80 | AD-9750 |
| 301-319 | GUCAGCUCCAGGCGGUCCUTsT | 81 | AGGACCGCCUGGAGCUGACTsT | 82 | AD-9623 |
| 301-319 | GucAGcuccAGGcGGuccuTsT | 83 | AGGACCGCCUGGAGCUGACTsT | 84 | AD-9749 |
| 370-388 | GGCGCCCGUGCGCAGGAGGTT | 85 | CCUCCUGCGCACGGGCGCCTT | 86 | AD-15384 |
| 408-426 | GGAGCUGGUGCUAGCCUUGTsT | 87 | CAAGGCUAGCACCAGCUCCTsT | 88 | AD-9607 |
| 408-426 | GGAGcuGGuGcuAGccuuGTsT | 89 | cAAGGCuAGcACcAGCUCCTsT | 90 | AD-9733 |
| 411-429 | GCUGGUGCUAGCCUUGCGUTsT | 91 | ACGCAAGGCUAGCACCAGCTsT | 92 | AD-9524 |
| 411-429 | GcuGGuGcuAGccuuGcGuTsT | 93 | ACGcAAGGCuAGcACcAGCTsT | 94 | AD-9650 |
| 412-430 | CUGGUGCUAGCCUUGCGUUTsT | 95 | AACGCAAGGCUAGCACCAGTsT | 96 | AD-9520 |
| 412-430 | CUGGUGCUAGCCUUGCGUUTsT | 97 | AACGCAAGGCUAGCACCAGTsT | 98 | AD-9520 |
| 412-430 | cuGGuGcuAGccuuGcGuuTsT | 99 | AACGcAAGGCuAGcACcAGTsT | 100 | AD-9646 |
| 416-434 | UGCUAGCCUUGCGUUCCGATsT | 101 | UCGGAACGCAAGGCUAGCATsT | 102 | AD-9608 |
| 416-434 | uGcuAGccuuGcGuuccGATsT | 103 | UCGGAACGcAAGGCuAGcATsT | 104 | AD-9734 |
| 419-437 | UAGCCUUGCGUUCCGAGGATsT | 105 | UCCUCGGAACGCAAGGCUATsT | 106 | AD-9546 |
| 419-437 | uAGccuuGcGuuccGAGGATsT | 107 | UCCUCGGAACGcAAGGCuATsT | 108 | AD-9672 |
| 439-457 | GACGGCCUGGCCGAAGCACTT | 109 | GUGCUUCGGCCAGGCCGUCTT | 110 | AD-15385 |
| 447-465 | GGCCGAAGCACCCGAGCACTT | 111 | GUGCUCGGGUGCUUCGGCCTT | 112 | AD-15393 |
| 448-466 | GCCGAAGCACCCGAGCACGTT | 113 | CGUGCUCGGGUGCUUCGGCTT | 114 | AD-15316 |
| 449-467 | CCGAAGCACCCGAGCACGGTT | 115 | CCGUGCUCGGGUGCUUCGGTT | 116 | AD-15317 |
| 458-476 | CCGAGCACGGAACCACAGCTT | 117 | GCUGUGGUUCCGUGCUCGGTT | 118 | AD-15318 |
| 484-502 | CACCGCUGCGCCAAGGAUCTT | 119 | GAUCCUUGGCGCAGCGGUGTT | 120 | AD-15195 |
| 486-504 | CCGCUGCGCCAAGGAUCCGTT | 121 | CGGAUCCUUGGCGCAGCGGTT | 122 | AD-15224 |
| 487-505 | CGCUGCGCCAAGGAUCCGUTT | 123 | ACGGAUCCUUGGCGCAGCGTT | 124 | AD-15188 |
| 489-507 | CUGCGCCAAGGAUCCGUGGTT | 125 | CCACGGAUCCUUGGCGCAGTT | 126 | AD-15225 |
| 500-518 | AUCCGUGGAGGUUGCCUGGTT | 127 | CCAGGCAACCUCCACGGAUTT | 128 | AD-15281 |
| 509-527 | GGUUGCCUGGCACCUACGUTT | 129 | ACGUAGGUGCCAGGCAACCTT | 130 | AD-15282 |
| 542-560 | AGGAGACCCACCUCUCGCATT | 131 | UGCGAGAGGUGGGUCUCCUTT | 132 | AD-15319 |
| 543-561 | GGAGACCCACCUCUCGCAGTT | 133 | CUGCGAGAGGUGGGUCUCCTT | 134 | AD-15226 |
| 544-562 | GAGACCCACCUCUCGCAGUTT | 135 | ACUGCGAGAGGUGGGUCUCTT | 136 | AD-15271 |
| 549-567 | CCACCUCUCGCAGUCAGAGTT | 137 | CUCUGACUGCGAGAGGUGGTT | 138 | AD-15283 |
| 552-570 | CCUCUCGCAGUCAGAGCGCTT | 139 | GCGCUCUGACUGCGAGAGGTT | 140 | AD-15284 |
| 553-571 | CUCUCGCAGUCAGAGCGCATT | 141 | UGCGCUCUGACUGCGAGAGTT | 142 | AD-15189 |
| 554-572 | UCUCGCAGUCAGAGCGCACTT | 143 | GUGCGCUCUGACUGCGAGATT | 144 | AD-15227 |
| 555-573 | CUCGCAGUCAGAGCGCACUTsT | 145 | AGUGCGCUCUGACUGCGAGTsT | 146 | AD-9547 |
| 555-573 | cucGcAGucAGAGcGcAcuTsT | 147 | AGUGCGCUCUGACUGCGAGTsT | 148 | AD-9673 |
| 558-576 | GCAGUCAGAGCGCACUGCCTsT | 149 | GGCAGUGCGCUCUGACUGCTsT | 150 | AD-9548 |
| 558-576 | GcAGucAGAGcGcAcuGccTsT | 151 | GGcAGUGCGCUCUGACUGCTsT | 152 | AD-9674 |
| 606-624 | GGGAUACCUCACCAAGAUCTsT | 153 | GAUCUUGGUGAGGUAUCCCTsT | 154 | AD-9529 |
| 606-624 | GGGAuAccucAccAAGAucTsT | 155 | GAUCUUGGUGAGGuAUCCCTsT | 156 | AD-9655 |
| 659-677 | UGGUGAAGAUGAGUGGCGATsT | 157 | UCGCCACUCAUCUUCACCATsT | 158 | AD-9605 |
| 659-677 | uGGuGAAGAuGAGuGGcGATsT | 159 | UCGCcACUcAUCUUcACcATsT | 160 | AD-9731 |
| 663-681 | GAAGAUGAGUGGCGACCUGTsT | 161 | CAGGUCGCCACUCAUCUUCTsT | 162 | AD-9596 |
| 663-681 | GAAGAuGAGuGGcGAccuGTsT | 163 | cAGGUCGCcACUcAUCUUCTsT | 164 | AD-9722 |
| 704-722 | CCCAUGUCGACUACAUCGATsT | 165 | UCGAUGUAGUCGACAUGGGTsT | 166 | AD-9583 |
| 704-722 | cccAuGucGAcuAcAucGATsT | 167 | UCGAUGuAGUCGAcAUGGGTsT | 168 | AD-9709 |
| 718-736 | AUCGAGGAGGACUCCUCUGTsT | 169 | CAGAGGAGUCCUCCUCGAUTsT | 170 | AD-9579 |
| 718-736 | AucGAGGAGGAcuccucuGTsT | 171 | cAGAGGAGUCCUCCUCGAUTsT | 172 | AD-9705 |
| 758-776 | GGAACCUGGAGCGGAUUACTT | 173 | GUAAUCCGCUCCAGGUUCCTT | 174 | AD-15394 |
| 759-777 | GAACCUGGAGCGGAUUACCTT | 175 | GGUAAUCCGCUCCAGGUUCTT | 176 | AD-15196 |
| 760-778 | AACCUGGAGCGGAUUACCCTT | 177 | GGGUAAUCCGCUCCAGGUUTT | 178 | AD-15197 |
| 777-795 | CCCUCCACGGUACCGGGCGTT | 179 | CGCCCGGUACCGUGGAGGGTT | 180 | AD-15198 |
| 782-800 | CACGGUACCGGGCGGAUGATsT | 181 | UCAUCCGCCCGGUACCGUGTsT | 182 | AD-9609 |
| 782-800 | cAcGGuAccGGGcGGAuGATsT | 183 | UcAUCCGCCCGGuACCGUGTsT | 184 | AD-9735 |
| 783-801 | ACGGUACCGGGCGGAUGAATsT | 185 | UUCAUCCGCCCGGUACCGUTsT | 186 | AD-9537 |
| 783-801 | AcGGuAccGGGcGGAuGAATsT | 187 | UUcAUCCGCCCGGuACCGUTsT | 188 | AD-9663 |
| 784-802 | CGGUACCGGGCGGAUGAAUTsT | 189 | AUUCAUCCGCCCGGUACCGTsT | 190 | AD-9528 |
| 784-802 | cGGuAccGGGcGGAuGAAuTsT | 191 | AUUcAUCCGCCCGGuACCGTsT | 192 | AD-9654 |
| 785-803 | GGUACCGGGCGGAUGAAUATsT | 193 | UAUUCAUCCGCCCGGUACCTsT | 194 | AD-9515 |
| 785-803 | GGuAccGGGcGGAuGAAuATsT | 195 | uAUUcAUCCGCCCGGuACCTsT | 196 | AD-9641 |
| 786-804 | GUACCGGGCGGAUGAAUACTsT | 197 | GUAUUCAUCCGCCCGGUACTsT | 198 | AD-9514 |
| 786-804 | GuAccGGGcGGAuGAAuAcTsT | 199 | GuAUUcAUCCGCCCGGuACTsT | 200 | AD-9640 |
| 788-806 | ACCGGGCGGAUGAAUACCATsT | 201 | UGGUAUUCAUCCGCCCGGUTsT | 202 | AD-9530 |
| 788-806 | AccGGGcGGAuGAAuAccATsT | 203 | UGGuAUUcAUCCGCCCGGUTsT | 204 | AD-9656 |
| 789-807 | CCGGGCGGAUGAAUACCAGTsT | 205 | CUGGUAUUCAUCCGCCCGGTsT | 206 | AD-9538 |
| 789-807 | ccGGGcGGAuGAAuAccAGTsT | 207 | CUGGuAUUcAUCCGCCCGGTsT | 208 | AD-9664 |
| 825-843 | CCUGGUGGAGGUGUAUCUCTsT | 209 | GAGAUACACCUCCACCAGGTsT | 210 | AD-9598 |
| 825-843 | ccuGGuGGAGGuGuAucucTsT | 211 | GAGAuAcACCUCcACcAGGTsT | 212 | AD-9724 |
| 826-844 | CUGGUGGAGGUGUAUCUCCTsT | 213 | GGAGAUACACCUCCACCAGTsT | 214 | AD-9625 |
| 826-844 | cuGGuGGAGGuGuAucuccTsT | 215 | GGAGAuAcACCUCcACcAGTsT | 216 | AD-9751 |
| 827-845 | UGGUGGAGGUGUAUCUCCUTsT | 217 | AGGAGAUACACCUCCACCATsT | 218 | AD-9556 |
| 827-845 | uGGuGGAGGuGuAucuccuTsT | 219 | AGGAGAuAcACCUCcACcATsT | 220 | AD-9682 |
| 828-846 | GGUGGAGGUGUAUCUCCUATsT | 221 | UAGGAGAUACACCUCCACCTsT | 222 | AD-9539 |
| 828-846 | GGuGGAGGuGuAucuccuATsT | 223 | uAGGAGAuAcACCUCcACCTsT | 224 | AD-9665 |
| 831-849 | GGAGGUGUAUCUCCUAGACTsT | 225 | GUCUAGGAGAUACACCUCCTsT | 226 | AD-9517 |
| 831-849 | GGAGGuGuAucuccuAGAcTsT | 227 | GUCuAGGAGAuAcACCUCCTsT | 228 | AD-9643 |
| 833-851 | AGGUGUAUCUCCUAGACACTsT | 229 | GUGUCUAGGAGAUACACCUTsT | 230 | AD-9610 |
| 833-851 | AGGuGuAucuccuAGAcAcTsT | 231 | GUGUCuAGGAGAuAcACCUTsT | 232 | AD-9736 |
| 833-851 | AfgGfuGfuAfuCfuCfcUfaGfaCfaCfTsT | 233 | p-gUfgUfcUfaGfgAfgAfuAfcAfcCfuTsT | 234 | AD-14681 |
| 833-851 | AGGUfGUfAUfCfUfCfCfUfAGACfACfTsT | 235 | GUfGUfCfUfAGGAGAUfACfACfCfUfTsT | 236 | AD-14691 |
| 833-851 | AgGuGuAuCuCcUaGaCaCTsT | 237 | p-gUfgUfcUfaGfgAfgAfuAfcAfcCfuTsT | 238 | AD-14701 |
| 833-851 | AgGuGuAuCuCcUaGaCaCTsT | 239 | GUfGUfCfUfAGGAGAUfACfACfCfUfTsT | 240 | AD-14711 |
| 833-851 | AfgGfuGfuAfuCfuCfcUfaGfaCfaCfTsT | 241 | GUGUCuaGGagAUACAccuTsT | 242 | AD-14721 |
| 833-851 | AGGUfGUfAUfCfUfCfCfUfAGACfACfTsT | 243 | GUGUCuaGGagAUACAccuTsT | 244 | AD-14731 |
| 833-851 | AgGuGuAuCuCcUaGaCaCTsT | 245 | GUGUCuaGGagAUACAccuTsT | 246 | AD-14741 |
| 833-851 | GfcAfcCfcUfcAfuAfgGfcCfuGfgAffsT | 247 | p-uCfcAfgGfcCfuAfuGfaGfgGfuGfcTsT | 248 | AD-15087 |
| 833-851 | GCfACfCfCfUfCfAUfAGGCfCfUfGGATsT | 249 | UfCfCfAGGCfCfUfAUfGAGGGUfGCfTsT | 250 | AD-15097 |
| 833-851 | GcAcCcUcAuAgGcCuGgATsT | 251 | p-uCfcAfgGfcCfuAfuGfaGfgGfuGfcTsT | 252 | AD-15107 |
| 833-851 | GcAcCcUcAuAgGcCuGgATsT | 253 | UfCfCfAGGCfCfUfAUfGAGGGUfGCfTsT | 254 | AD-15117 |
| 833-851 | GfcAfcCfcUfcAfuAfgGfcCfuGfgAffsT | 255 | UCCAGgcCUauGAGGGugcTsT | 256 | AD-15127 |
| 833-851 | GCfACfCfCfUfCfAUfAGGCfCfUfGGATsT | 257 | UCCAGgcCUauGAGGGugcTsT | 258 | AD-15137 |
| 833-851 | GcAcCcUcAuAgGcCuGgATsT | 259 | UCCAGgcCUauGAGGGugcTsT | 260 | AD-15147 |
| 836-854 | UGUAUCUCCUAGACACCAGTsT | 261 | CUGGUGUCUAGGAGAUACATsT | 262 | AD-9516 |
| 836-854 | uGuAucuccuAGAcAccAGTsT | 263 | CUGGUGUCuAGGAGAuAcATsT | 264 | AD-9642 |
| 840-858 | UCUCCUAGACACCAGCAUATsT | 265 | UAUGCUGGUGUCUAGGAGATsT | 266 | AD-9562 |
| 840-858 | ucuccuAGAcAccAGcAuATsT | 267 | uAUGCUGGUGUCuAGGAGATsT | 268 | AD-9688 |
| 840-858 | UfcUfcCfuAfgAfcAfcCfaGfcAfuAfTsT | 269 | p-uAfuGfcUfgGfuGfuCfuAfgGfaGfaTsT | 270 | AD-14677 |
| 840-858 | UfCfUfCfCfUfAGACfACfCfAGCfAUfATsT | 271 | UfAUfGCfUfGGUfGUfCfUfAGGAGATsT | 272 | AD-14687 |
| 840-858 | UcUcCuAgAcAcCaGcAuATsT | 273 | p-uAfuGfcUfgGfuGfuCfuAfgGfaGfaTsT | 274 | AD-14697 |
| 840-858 | UcUcCuAgAcAcCaGcAuATsT | 275 | UfAUfGCfUfGGUfGUfCfUfAGGAGATsT | 276 | AD-14707 |
| 840-858 | UfatfcCMAafAfcAfcCfaGfcAfuAffsT | 277 | UAUGCugGUguCUAGGagaTsT | 278 | AD-14717 |
| 840-858 | UfCfUfCfCfUfAGACfACfCfAGCfAUfATsT | 279 | UAUGCugGUguCUAGGagaTsT | 280 | AD-14727 |
| 840-858 | UcUcCuAgAcAcCaGcAuATsT | 281 | UAUGCugGUguCUAGGagaTsT | 282 | AD-14737 |
| 840-858 | AfgGfcCfuGfgAfgUfuUfaUfuCfgGfTsT | 283 | p-cCfgAfaUfaAfaCfuCfcAfgGfcCfuTsT | 284 | AD-15083 |
| 840-858 | AGGCfCfUfGGAGUfUfUfAUfUfCfGGTsT | 285 | CfCfGAAUfAAACfUfCfCfAGGCfCfUfTsT | 286 | AD-15093 |
| 840-858 | AgGcCuGgAgUuUaUuCgGTsT | 287 | p-cCfgAfaUfaAfaCfuCfcAfgGfcCfuTsT | 288 | AD-15103 |
| 840-858 | AgGcCuGgAgUuUaUuCgGTsT | 289 | CfCfGAAUfAAACfUfCfCfAGGCfCfUfTsT | 290 | AD-15113 |
| 840-858 | AfgGfcCfuGfgAfgUfuUfaUfuCfgGfTsT | 291 | CCGAAuaAAcuCCAGGccuTsT | 292 | AD-15123 |
| 840-858 | AGGCfCfUfGGAGUfUfUfAUfUfCfGGTsT | 293 | CCGAAuaAAcuCCAGGccuTsT | 294 | AD-15133 |
| 840-858 | AgGcCuGgAgUuUaUuCgGTsT | 295 | CCGAAuaAAcuCCAGGccuTsT | 296 | AD-15143 |
| 841-859 | CUCCUAGACACCAGCAUACTsT | 297 | GUAUGCUGGUGUCUAGGAGTsT | 298 | AD-9521 |
| 841-859 | cuccuAGAcAccAGcAuAcTsT | 299 | GuAUGCUGGUGUCuAGGAGTsT | 300 | AD-9647 |
| 842-860 | UCCUAGACACCAGCAUACATsT | 301 | UGUAUGCUGGUGUCUAGGATsT | 302 | AD-9611 |
| 842-860 | uccuAGAcAccAGcAuAcATsT | 303 | UGuAUGCUGGUGUCuAGGATsT | 304 | AD-9737 |
| 843-861 | CCUAGACACCAGCAUACAGTsT | 305 | CUGUAUGCUGGUGUCUAGGTsT | 306 | AD-9592 |
| 843-861 | ccuAGAcAccAGcAuAcAGTsT | 307 | CUGuAUGCUGGUGUCuAGGTsT | 308 | AD-9718 |
| 847-865 | GACACCAGCAUACAGAGUGTsT | 309 | CACUCUGUAUGCUGGUGUCTsT | 310 | AD-9561 |
| 847-865 | GAcAccAGcAuAcAGAGuGTsT | 311 | cACUCUGuAUGCUGGUGUCTsT | 312 | AD-9687 |
| 855-873 | CAUACAGAGUGACCACCGGTsT | 313 | CCGGUGGUCACUCUGUAUGTsT | 314 | AD-9636 |
| 855-873 | cAuAcAGAGuGAccAccGGTsT | 315 | CCGGUGGUcACUCUGuAUGTsT | 316 | AD-9762 |
| 860-878 | AGAGUGACCACCGGGAAAUTsT | 317 | AUUUCCCGGUGGUCACUCUTsT | 318 | AD-9540 |
| 860-878 | AGAGuGAccAccGGGAAAuTsT | 319 | AUUUCCCGGUGGUcACUCUTsT | 320 | AD-9666 |
| 861-879 | GAGUGACCACCGGGAAAUCTsT | 321 | GAUUUCCCGGUGGUCACUCTsT | 322 | AD-9535 |
| 861-879 | GAGuGAccAccGGGAAAucTsT | 323 | GAUUUCCCGGUGGUcACUCTsT | 324 | AD-9661 |
| 863-881 | GUGACCACCGGGAAAUCGATsT | 325 | UCGAUUUCCCGGUGGUCACTsT | 326 | AD-9559 |
| 863-881 | GuGAccAccGGGAAAucGATsT | 327 | UCGAUUUCCCGGUGGUcACTsT | 328 | AD-9685 |
| 865-883 | GACCACCGGGAAAUCGAGGTsT | 329 | CCUCGAUUUCCCGGUGGUCTsT | 330 | AD-9533 |
| 865-883 | GAccAccGGGAAAucGAGGTsT | 331 | CCUCGAUUUCCCGGUGGUCTsT | 332 | AD-9659 |
| 866-884 | ACCACCGGGAAAUCGAGGGTsT | 333 | CCCUCGAUUUCCCGGUGGUTsT | 334 | AD-9612 |
| 866-884 | AccAccGGGAAAucGAGGGTsT | 335 | CCCUCGAUUUCCCGGUGGUTsT | 336 | AD-9738 |
| 867-885 | CCACCGGGAAAUCGAGGGCTsT | 337 | GCCCUCGAUUUCCCGGUGGTsT | 338 | AD-9557 |
| 867-885 | ccAccGGGAAAucGAGGGcTsT | 339 | GCCCUCGAUUUCCCGGUGGTsT | 340 | AD-9683 |
| 875-893 | AAAUCGAGGGCAGGGUCAUTsT | 341 | AUGACCCUGCCCUCGAUUUTsT | 342 | AD-9531 |
| 875-893 | AAAucGAGGGcAGGGucAuTsT | 343 | AUGACCCUGCCCUCGAUUUTsT | 344 | AD-9657 |
| 875-893 | AfaAfuCfgAfgGfgCfaGfgGfuCfaUfTsT | 345 | p-aUfgAfcCfcUfgCfcCfuCfgAfuUfuTsT | 346 | AD-14673 |
| 875-893 | AAAUfCfGAGGGCfAGGGUfCfAUfTsT | 347 | AUfGACfCfCfUfGCfCfCfUfCfGAUfUfUfTsT | 348 | AD-14683 |
| 875-893 | AaAuCgAgGgCaGgGuCaUTsT | 349 | p-aUfgAfcCfcUfgCfcCfuCfgAfuUfuTsT | 350 | AD-14693 |
| 875-893 | AaAuCgAgGgCaGgGuCaUTsT | 351 | AUfGACfCfCfUfGCfCfCfUfCfGAUfUfUfTsT | 352 | AD-14703 |
| 875-893 | AfaAfuCfgAfgGfgCfaGfgGfuCfaUfTsT | 353 | AUGACccUGccCUCGAuuuTsT | 354 | AD-14713 |
| 875-893 | AAAUfCfGAGGGCfAGGGUfCfAUfTsT | 355 | AUGACccUGccCUCGAuuuTsT | 356 | AD-14723 |
| 875-893 | AaAuCgAgGgCaGgGuCaUTsT | 357 | AUGACccUGccCUCGAuuuTsT | 358 | AD-14733 |
| 875-893 | CfgGfcAfcCfcUfcAfuAfgGfcCfuGfTsT | 359 | p-cAfgGfcCfuAfuGfaGfgGfuGfcCfgTsT | 360 | AD-15079 |
| 875-893 | CfGGCfACfCfCfUfCfAUfAGGCfCfUfGTsT | 361 | CfAGGCfCfUfAUfGAGGGUfGCfCfGTsT | 362 | AD-15089 |
| 875-893 | CgGcAcCcUcAuAgGcCuGTsT | 363 | p-cAfgGfcCfuAfuGfaGfgGfuGfcCfgTsT | 364 | AD-15099 |
| 875-893 | CgGcAcCcUcAuAgGcCuGTsT | 365 | CfAGGCfCfUfAUfGAGGGUfGCfCfGTsT | 366 | AD-15109 |
| 875-893 | CfgGfcAfcCfcUfcAfuAfgGfcCfuGfTsT | 367 | CAGGCcuAUgaGGGUGccgTsT | 368 | AD-15119 |
| 875-893 | CfGGCfACfCfCfUfCfAUfAGGCfCfUfGTsT | 369 | CAGGCcuAUgaGGGUGccgTsT | 370 | AD-15129 |
| 875-893 | CgGcAcCcUcAuAgGcCuGTsT | 371 | CAGGCcuAUgaGGGUGccgTsT | 372 | AD-15139 |
| 877-895 | AUCGAGGGCAGGGUCAUGGTsT | 373 | CCAUGACCCUGCCCUCGAUTsT | 374 | AD-9542 |
| 877-895 | AucGAGGGcAGGGucAuGGTsT | 375 | CcAUGACCCUGCCCUCGAUTsT | 376 | AD-9668 |
| 878-896 | cGAGGGcAGGGucAuGGucTsT | 377 | GACcAUGACCCUGCCCUCGTsT | 378 | AD-9739 |
| 880-898 | GAGGGCAGGGUCAUGGUCATsT | 379 | UGACCAUGACCCUGCCCUCTsT | 380 | AD-9637 |
| 880-898 | GAGGGcAGGGucAuGGucATsT | 381 | UGACcAUGACCCUGCCCUCTsT | 382 | AD-9763 |
| 882-900 | GGGCAGGGUCAUGGUCACCTsT | 383 | GGUGACCAUGACCCUGCCCTsT | 384 | AD-9630 |
| 882-900 | GGGcAGGGucAuGGucAccTsT | 385 | GGUGACcAUGACCCUGCCCTsT | 386 | AD-9756 |
| 885-903 | CAGGGUCAUGGUCACCGACTsT | 387 | GUCGGUGACCAUGACCCUGTsT | 388 | AD-9593 |
| 885-903 | cAGGGucAuGGucAccGAcTsT | 389 | GUCGGUGACcAUGACCCUGTsT | 390 | AD-9719 |
| 886-904 | AGGGUCAUGGUCACCGACUTsT | 391 | AGUCGGUGACCAUGACCCUTsT | 392 | AD-9601 |
| 886-904 | AGGGucAuGGucAccGAcuTsT | 393 | AGUCGGUGACcAUGACCCUTsT | 394 | AD-9727 |
| 892-910 | AUGGUCACCGACUUCGAGATsT | 395 | UCUCGAAGUCGGUGACCAUTsT | 396 | AD-9573 |
| 892-910 | AuGGucAccGAcuucGAGATsT | 397 | UCUCGAAGUCGGUGACcAUTsT | 398 | AD-9699 |
| 899-917 | CCGACUUCGAGAAUGUGCCTT | 399 | GGCACAUUCUCGAAGUCGGTT | 400 | AD-15228 |
| 921-939 | GGAGGACGGGACCCGCUUCTT | 401 | GAAGCGGGUCCCGUCCUCCTT | 402 | AD-15395 |
| 993-1011 | CAGCGGCCGGGAUGCCGGCTsT | 403 | GCCGGCAUCCCGGCCGCUGTsT | 404 | AD-9602 |
| 993-1011 | cAGcGGccGGGAuGccGGcTsT | 405 | GCCGGcAUCCCGGCCGCUGTsT | 406 | AD-9728 |
| 1020-1038 | GGGUGCCAGCAUGCGCAGCTT | 407 | GCUGCGCAUGCUGGCACCCTT | 408 | AD-15386 |
| 1038-1056 | CCUGCGCGUGCUCAACUGCTsT | 409 | GCAGUUGAGCACGCGCAGGTsT | 410 | AD-9580 |
| 1038-1056 | ccuGcGcGuGcucAAcuGcTsT | 411 | GcAGUUGAGcACGCGcAGGTsT | 412 | AD-9706 |
| 1040-1058 | UGCGCGUGCUCAACUGCCATsT | 413 | UGGCAGUUGAGCACGCGCATsT | 414 | AD-9581 |
| 1040-1058 | uGcGcGuGcucAAcuGccATsT | 415 | UGGcAGUUGAGcACGCGcATsT | 416 | AD-9707 |
| 1042-1060 | CGCGUGCUCAACUGCCAAGTsT | 417 | CUUGGCAGUUGAGCACGCGTsT | 418 | AD-9543 |
| 1042-1060 | cGcGuGcucAAcuGccAAGTsT | 419 | CUUGGcAGUUGAGcACGCGTsT | 420 | AD-9669 |
| 1053-1071 | CUGCCAAGGGAAGGGCACGTsT | 421 | CGUGCCCUUCCCUUGGCAGTsT | 422 | AD-9574 |
| 1053-1071 | cuGccAAGGGAAGGGcAcGTsT | 423 | CGUGCCCUUCCCUUGGcAGTsT | 424 | AD-9700 |
| 1057-1075 | CAAGGGAAGGGCACGGUUATT | 425 | UAACCGUGCCCUUCCCUUGTT | 426 | AD-15320 |
| 1058-1076 | AAGGGAAGGGCACGGUUAGTT | 427 | CUAACCGUGCCCUUCCCUUTT | 428 | AD-15321 |
| 1059-1077 | AGGGAAGGGCACGGUUAGCTT | 429 | GCUAACCGUGCCCUUCCCUTT | 430 | AD-15199 |
| 1060-1078 | GGGAAGGGCACGGUUAGCGTT | 431 | CGCUAACCGUGCCCUUCCCTT | 432 | AD-15167 |
| 1061-1079 | GGAAGGGCACGGUUAGCGGTT | 433 | CCGCUAACCGUGCCCUUCCTT | 434 | AD-15164 |
| 1062-1080 | GAAGGGCACGGUUAGCGGCTT | 435 | GCCGCUAACCGUGCCCUUCTT | 436 | AD-15166 |
| 1063-1081 | AAGGGCACGGUUAGCGGCATT | 437 | UGCCGCUAACCGUGCCCUUTT | 438 | AD-15322 |
| 1064-1082 | AGGGCACGGUUAGCGGCACTT | 439 | GUGCCGCUAACCGUGCCCUTT | 440 | AD-15200 |
| 1068-1086 | CACGGUUAGCGGCACCCUCTT | 441 | GAGGGUGCCGCUAACCGUGTT | 442 | AD-15213 |
| 1069-1087 | ACGGUUAGCGGCACCCUCATT | 443 | UGAGGGUGCCGCUAACCGUTT | 444 | AD-15229 |
| 1072-1090 | GUUAGCGGCACCCUCAUAGTT | 445 | CUAUGAGGGUGCCGCUAACTT | 446 | AD-15215 |
| 1073-1091 | UUAGCGGCACCCUCAUAGGTT | 447 | CCUAUGAGGGUGCCGCUAATT | 448 | AD-15214 |
| 1076-1094 | GCGGCACCCUCAUAGGCCUTsT | 449 | AGGCCUAUGAGGGUGCCGCTsT | 450 | AD-9315 |
| 1079-1097 | GCACCCUCAUAGGCCUGGATsT | 451 | UCCAGGCCUAUGAGGGUGCTsT | 452 | AD-9326 |
| 1085-1103 | UCAUAGGCCUGGAGUUUAUTsT | 453 | AUAAACUCCAGGCCUAUGATsT | 454 | AD-9318 |
| 1090-1108 | GGCCUGGAGUUUAUUCGGATsT | 455 | UCCGAAUAAACUCCAGGCCTsT | 456 | AD-9323 |
| 1091-1109 | GCCUGGAGUUUAUUCGGAATsT | 457 | UUCCGAAUAAACUCCAGGCTsT | 458 | AD-9314 |
| 1091-1109 | GccuGGAGuuuAuucGGAATsT | 459 | UUCCGAAuAAACUCcAGGCTsT | 460 | AD-10792 |
| 1091-1109 | GccuGGAGuuuAuucGGAATsT | 461 | UUCCGAAUAACUCCAGGCTsT | 462 | AD-10796 |
| 1093-1111 | CUGGAGUUUAUUCGGAAAATsT | 463 | UUUUCCGAAUAAACUCCAGTsT | 464 | AD-9638 |
| 1093-1111 | cuGGAGuuuAuucGGAAAATsT | 465 | UUUUCCGAAuAAACUCcAGTsT | 466 | AD-9764 |
| 1095-1113 | GGAGUUUAUUCGGAAAAGCTsT | 467 | GCUUUUCCGAAUAAACUCCTsT | 468 | AD-9525 |
| 1095-1113 | GGAGuuuAuucGGAAAAGcTsT | 469 | GCUUUUCCGAAuAAACUCCTsT | 470 | AD-9651 |
| 1096-1114 | GAGUUUAUUCGGAAAAGCCTsT | 471 | GGCUUUUCCGAAUAAACUCTsT | 472 | AD-9560 |
| 1096-1114 | GAGuuuAuucGGAAAAGccTsT | 473 | GGCUUUUCCGAAuAAACUCTsT | 474 | AD-9686 |
| 1100-1118 | UUAUUCGGAAAAGCCAGCUTsT | 475 | AGCUGGCUUUUCCGAAUAATsT | 476 | AD-9536 |
| 1100-1118 | uuAuucGGAAAAGccAGcuTsT | 477 | AGCUGGCUUUUCCGAAuAATsT | 478 | AD-9662 |
| 1154-1172 | CCCUGGCGGGUGGGUACAGTsT | 479 | CUGUACCCACCCGCCAGGGTsT | 480 | AD-9584 |
| 1154-1172 | cccuGGcGGGuGGGuAcAGTsT | 481 | CUGuACCcACCCGCcAGGGTsT | 482 | AD-9710 |
| 1155-1173 | CCUGGCGGGUGGGUACAGCTT | 483 | GCUGUACCCACCCGCCAGGTT | 484 | AD-15323 |
| 1157-1175 | UGGCGGGUGGGUACAGCCGTsT | 485 | CGGCUGUACCCACCCGCCATsT | 486 | AD-9551 |
| 1157-1175 | uGGcGGGuGGGuAcAGccGTsT | 487 | CGGCUGuACCcACCCGCcATsT | 488 | AD-9677 |
| 1158-1176 | GGCGGGUGGGUACAGCCGCTT | 489 | GCGGCUGUACCCACCCGCCTT | 490 | AD-15230 |
| 1162-1180 | GGUGGGUACAGCCGCGUCCTT | 491 | GGACGCGGCUGUACCCACCTT | 492 | AD-15231 |
| 1164-1182 | UGGGUACAGCCGCGUCCUCTT | 493 | GAGGACGCGGCUGUACCCATT | 494 | AD-15285 |
| 1172-1190 | GCCGCGUCCUCAACGCCGCTT | 495 | GCGGCGUUGAGGACGCGGCTT | 496 | AD-15396 |
| 1173-1191 | CCGCGUCCUCAACGCCGCCTT | 497 | GGCGGCGUUGAGGACGCGGTT | 498 | AD-15397 |
| 1216-1234 | GUCGUGCUGGUCACCGCUGTsT | 499 | CAGCGGUGACCAGCACGACTsT | 500 | AD-9600 |
| 1216-1234 | GucGuGcuGGucAccGcuGTsT | 501 | cAGCGGUGACcAGcACGACTsT | 502 | AD-9726 |
| 1217-1235 | UCGUGCUGGUCACCGCUGCTsT | 503 | GCAGCGGUGACCAGCACGATsT | 504 | AD-9606 |
| 1217-1235 | ucGuGcuGGucAccGcuGcTsT | 505 | GcAGCGGUGACcAGcACGATsT | 506 | AD-9732 |
| 1223-1241 | UGGUCACCGCUGCCGGCAATsT | 507 | UUGCCGGCAGCGGUGACCATsT | 508 | AD-9633 |
| 1223-1241 | uGGucAccGcuGccGGcAATsT | 509 | UUGCCGGcAGCGGUGACcATsT | 510 | AD-9759 |
| 1224-1242 | GGUCACCGCUGCCGGCAACTsT | 511 | GUUGCCGGCAGCGGUGACCTsT | 512 | AD-9588 |
| 1224-1242 | GGucAccGcuGccGGcAAcTsT | 513 | GUUGCCGGcAGCGGUGACCTsT | 514 | AD-9714 |
| 1227-1245 | CACCGCUGCCGGCAACUUCTsT | 515 | GAAGUUGCCGGCAGCGGUGTsT | 516 | AD-9589 |
| 1227-1245 | cAccGcuGccGGcAAcuucTsT | 517 | GAAGUUGCCGGcAGCGGUGTsT | 518 | AD-9715 |
| 1229-1247 | CCGCUGCCGGCAACUUCCGTsT | 519 | CGGAAGUUGCCGGCAGCGGTsT | 520 | AD-9575 |
| 1229-1247 | ccGcuGccGGcAAcuuccGTsT | 521 | CGGAAGUUGCCGGcAGCGGTsT | 522 | AD-9701 |
| 1230-1248 | CGCUGCCGGCAACUUCCGGTsT | 523 | CCGGAAGUUGCCGGCAGCGTsT | 524 | AD-9563 |
| 1230-1248 | cGcuGccGGcAAcuuccGGTsT | 525 | CCGGAAGUUGCCGGcAGCGTsT | 526 | AD-9689 |
| 1231-1249 | GCUGCCGGCAACUUCCGGGTsT | 527 | CCCGGAAGUUGCCGGCAGCTsT | 528 | AD-9594 |
| 1231-1249 | GcuGccGGcAAcuuccGGGTsT | 529 | CCCGGAAGUUGCCGGcAGCTsT | 530 | AD-9720 |
| 1236-1254 | CGGCAACUUCCGGGACGAUTsT | 531 | AUCGUCCCGGAAGUUGCCGTsT | 532 | AD-9585 |
| 1236-1254 | cGGcAAcuuccGGGAcGAuTsT | 533 | AUCGUCCCGGAAGUUGCCGTsT | 534 | AD-9711 |
| 1237-1255 | GGCAACUUCCGGGACGAUGTsT | 535 | CAUCGUCCCGGAAGUUGCCTsT | 536 | AD-9614 |
| 1237-1255 | GGcAAcuuccGGGAcGAuGTsT | 537 | cAUCGUCCCGGAAGUUGCCTsT | 538 | AD-9740 |
| 1243-1261 | UUCCGGGACGAUGCCUGCCTsT | 539 | GGCAGGCAUCGUCCCGGAATsT | 540 | AD-9615 |
| 1243-1261 | uuccGGGAcGAuGccuGccTsT | 541 | GGcAGGcAUCGUCCCGGAATsT | 542 | AD-9741 |
| 1248-1266 | GGACGAUGCCUGCCUCUACTsT | 543 | GUAGAGGCAGGCAUCGUCCTsT | 544 | AD-9534 |
| 1248-1266 | GGACGAUGCCUGCCUCUACTsT | 545 | GUAGAGGCAGGCAUCGUCCTsT | 546 | AD-9534 |
| 1248-1266 | GGAcGAuGccuGccucuAcTsT | 547 | GuAGAGGcAGGcAUCGUCCTsT | 548 | AD-9660 |
| 1279-1297 | GCUCCCGAGGUCAUCACAGTT | 549 | CUGUGAUGACCUCGGGAGCTT | 550 | AD-15324 |
| 1280-1298 | CUCCCGAGGUCAUCACAGUTT | 551 | ACUGUGAUGACCUCGGGAGTT | 552 | AD-15232 |
| 1281-1299 | UCCCGAGGUCAUCACAGUUTT | 553 | AACUGUGAUGACCUCGGGATT | 554 | AD-15233 |
| 1314-1332 | CCAAGACCAGCCGGUGACCTT | 555 | GGUCACCGGCUGGUCUUGGTT | 556 | AD-15234 |
| 1315-1333 | CAAGACCAGCCGGUGACCCTT | 557 | GGGUCACCGGCUGGUCUUGTT | 558 | AD-15286 |
| 1348-1366 | ACCAACUUUGGCCGCUGUGTsT | 559 | CACAGCGGCCAAAGUUGGUTsT | 560 | AD-9590 |
| 1348-1366 | AccAAcuuuGGccGcuGuGTsT | 561 | cAcAGCGGCcAAAGUUGGUTsT | 562 | AD-9716 |
| 1350-1368 | CAACUUUGGCCGCUGUGUGTsT | 563 | CACACAGCGGCCAAAGUUGTsT | 564 | AD-9632 |
| 1350-1368 | cAAcuuuGGccGcuGuGuGTsT | 565 | cAcAcAGCGGCcAAAGUUGTsT | 566 | AD-9758 |
| 1360-1378 | CGCUGUGUGGACCUCUUUGTsT | 567 | CAAAGAGGUCCACACAGCGTsT | 568 | AD-9567 |
| 1360-1378 | cGcuGuGuGGAccucuuuGTsT | 569 | cAAAGAGGUCcAcAcAGCGTsT | 570 | AD-9693 |
| 1390-1408 | GACAUCAUUGGUGCCUCCATsT | 571 | UGGAGGCACCAAUGAUGUCTsT | 572 | AD-9586 |
| 1390-1408 | GAcAucAuuGGuGccuccATsT | 573 | UGGAGGcACcAAUGAUGUCTsT | 574 | AD-9712 |
| 1394-1412 | UCAUUGGUGCCUCCAGCGATsT | 575 | UCGCUGGAGGCACCAAUGATsT | 576 | AD-9564 |
| 1394-1412 | ucAuuGGuGccuccAGcGATsT | 577 | UCGCUGGAGGcACcAAUGATsT | 578 | AD-9690 |
| 1417-1435 | AGCACCUGCUUUGUGUCACTsT | 579 | GUGACACAAAGCAGGUGCUTsT | 580 | AD-9616 |
| 1417-1435 | AGcAccuGcuuuGuGucAcTsT | 581 | GUGAcAcAAAGcAGGUGCUTsT | 582 | AD-9742 |
| 1433-1451 | CACAGAGUGGGACAUCACATT | 583 | UGUGAUGUCCCACUCUGUGTT | 584 | AD-15398 |
| 1486-1504 | AUGCUGUCUGCCGAGCCGGTsT | 585 | CCGGCUCGGCAGACAGCAUTsT | 586 | AD-9617 |
| 1486-1504 | AuGcuGucuGccGAGccGGTsT | 587 | CCGGCUCGGcAGAcAGcAUTsT | 588 | AD-9743 |
| 1491-1509 | GUCUGCCGAGCCGGAGCUCTsT | 589 | GAGCUCCGGCUCGGCAGACTsT | 590 | AD-9635 |
| 1491-1509 | GucuGccGAGccGGAGcucTsT | 591 | GAGCUCCGGCUCGGcAGACTsT | 592 | AD-9761 |
| 1521-1539 | GUUGAGGCAGAGACUGAUCTsT | 593 | GAUCAGUCUCUGCCUCAACTsT | 594 | AD-9568 |
| 1521-1539 | GuuGAGGcAGAGAcuGAucTsT | 595 | GAUcAGUCUCUGCCUcAACTsT | 596 | AD-9694 |
| 1527-1545 | GCAGAGACUGAUCCACUUCTsT | 597 | GAAGUGGAUCAGUCUCUGCTsT | 598 | AD-9576 |
| 1527-1545 | GcAGAGAcuGAuccAcuucTsT | 599 | GAAGUGGAUcAGUCUCUGCTsT | 600 | AD-9702 |
| 1529-1547 | AGAGACUGAUCCACUUCUCTsT | 601 | GAGAAGUGGAUCAGUCUCUTsT | 602 | AD-9627 |
| 1529-1547 | AGAGAcuGAuccAcuucucTsT | 603 | GAGAAGUGGAUcAGUCUCUTsT | 604 | AD-9753 |
| 1543-1561 | UUCUCUGCCAAAGAUGUCATsT | 605 | UGACAUCUUUGGCAGAGAATsT | 606 | AD-9628 |
| 1543-1561 | uucucuGccAAAGAuGucATsT | 607 | UGAcAUCUUUGGcAGAGAATsT | 608 | AD-9754 |
| 1545-1563 | CUCUGCCAAAGAUGUCAUCTsT | 609 | GAUGACAUCUUUGGCAGAGTsT | 610 | AD-9631 |
| 1545-1563 | cucuGccAAAGAuGucAucTsT | 611 | GAUGAcAUCUUUGGcAGAGTsT | 612 | AD-9757 |
| 1580-1598 | CUGAGGACCAGCGGGUACUTsT | 613 | AGUACCCGCUGGUCCUCAGTsT | 614 | AD-9595 |
| 1580-1598 | cuGAGGAccAGcGGGuAcuTsT | 615 | AGuACCCGCUGGUCCUcAGTsT | 616 | AD-9721 |
| 1581-1599 | UGAGGACCAGCGGGUACUGTsT | 617 | CAGUACCCGCUGGUCCUCATsT | 618 | AD-9544 |
| 1581-1599 | uGAGGAccAGcGGGuAcuGTsT | 619 | cAGuACCCGCUGGUCCUcATsT | 620 | AD-9670 |
| 1666-1684 | ACUGUAUGGUCAGCACACUTT | 621 | AGUGUGCUGACCAUACAGUTT | 622 | AD-15235 |
| 1668-1686 | UGUAUGGUCAGCACACUCGTT | 623 | CGAGUGUGCUGACCAUACATT | 624 | AD-15236 |
| 1669-1687 | GUAUGGUCAGCACACUCGGTT | 625 | CCGAGUGUGCUGACCAUACTT | 626 | AD-15168 |
| 1697-1715 | GGAUGGCCACAGCCGUCGCTT | 627 | GCGACGGCUGUGGCCAUCCTT | 628 | AD-15174 |
| 1698-1716 | GAUGGCCACAGCCGUCGCCTT | 629 | GGCGACGGCUGUGGCCAUCTT | 630 | AD-15325 |
| 1806-1824 | CAAGCUGGUCUGCCGGGCCTT | 631 | GGCCCGGCAGACCAGCUUGTT | 632 | AD-15326 |
| 1815-1833 | CUGCCGGGCCCACAACGCUTsT | 633 | AGCGUUGUGGGCCCGGCAGTsT | 634 | AD-9570 |
| 1815-1833 | cuGccGGGcccAcAAcGcuTsT | 635 | AGCGUUGUGGGCCCGGcAGTsT | 636 | AD-9696 |
| 1816-1834 | UGCCGGGCCCACAACGCUUTsT | 637 | AAGCGUUGUGGGCCCGGCATsT | 638 | AD-9566 |
| 1816-1834 | uGccGGGcccAcAAcGcuuTsT | 639 | AAGCGUUGUGGGCCCGGcATsT | 640 | AD-9692 |
| 1818-1836 | CCGGGCCCACAACGCUUUUTsT | 641 | AAAAGCGUUGUGGGCCCGGTsT | 642 | AD-9532 |
| 1818-1836 | ccGGGcccAcAAcGcuuuuTsT | 643 | AAAAGCGUUGUGGGCCCGGTsT | 644 | AD-9658 |
| 1820-1838 | GGGCCCACAACGCUUUUGGTsT | 645 | CCAAAAGCGUUGUGGGCCCTsT | 646 | AD-9549 |
| 1820-1838 | GGGcccAcAAcGcuuuuGGTsT | 647 | CcAAAAGCGUUGUGGGCCCTsT | 648 | AD-9675 |
| 1840-1858 | GGUGAGGGUGUCUACGCCATsT | 649 | UGGCGUAGACACCCUCACCTsT | 650 | AD-9541 |
| 1840-1858 | GGuGAGGGuGucuAcGccATsT | 651 | UGGCGuAGAcACCCUcACCTsT | 652 | AD-9667 |
| 1843-1861 | GAGGGUGUCUACGCCAUUGTsT | 653 | CAAUGGCGUAGACACCCUCTsT | 654 | AD-9550 |
| 1843-1861 | GAGGGuGucuAcGccAuuGTsT | 655 | cAAUGGCGuAGAcACCCUCTsT | 656 | AD-9676 |
| 1861-1879 | GCCAGGUGCUGCCUGCUACTsT | 657 | GUAGCAGGCAGCACCUGGCTsT | 658 | AD-9571 |
| 1861-1879 | GccAGGuGcuGccuGcuAcTsT | 659 | GuAGcAGGcAGcACCUGGCTsT | 660 | AD-9697 |
| 1862-1880 | CCAGGUGCUGCCUGCUACCTsT | 661 | GGUAGCAGGCAGCACCUGGTsT | 662 | AD-9572 |
| 1862-1880 | ccAGGuGcuGccuGcuAccTsT | 663 | GGuAGcAGGcAGcACCUGGTsT | 664 | AD-9698 |
| 2008-2026 | ACCCACAAGCCGCCUGUGCTT | 665 | GCACAGGCGGCUUGUGGGUTT | 666 | AD-15327 |
| 2023-2041 | GUGCUGAGGCCACGAGGUCTsT | 667 | GACCUCGUGGCCUCAGCACTsT | 668 | AD-9639 |
| 2023-2041 | GuGcuGAGGccAcGAGGucTsT | 669 | GACCUCGUGGCCUcAGcACTsT | 670 | AD-9765 |
| 2024-2042 | UGCUGAGGCCACGAGGUCATsT | 671 | UGACCUCGUGGCCUCAGCATsT | 672 | AD-9518 |
| 2024-2042 | UGCUGAGGCCACGAGGUCATsT | 673 | UGACCUCGUGGCCUCAGCATsT | 674 | AD-9518 |
| 2024-2042 | uGcuGAGGccAcGAGGucATsT | 675 | UGACCUCGUGGCCUcAGcATsT | 676 | AD-9644 |
| 2024-2042 | UfgCfuGfaGfgCfcAfcGfaGfgUfcAfTsT | 677 | p-uGfaCfcUfcGfuGfgCfcUfcAfgCfaTsT | 678 | AD-14672 |
| 2024-2042 | UfGCfUfGAGGCfCfACfGAGGUfCfATsT | 679 | UfGACfCfUfCfGUfGGCfCfUfCfAGCfATsT | 680 | AD-14682 |
| 2024-2042 | UgCuGaGgCcAcGaGgUcATsT | 681 | p-uGfaCfcUfcGfuGfgCfcUfcAfgCfaTsT | 682 | AD-14692 |
| 2024-2042 | UgCuGaGgCcAcGaGgUcATsT | 683 | UfGACfCfUfCfGUfGGCfCfUfCfAGCfATsT | 684 | AD-14702 |
| 2024-2042 | UfgCfuGfaGfgCfcAfcGfaGfgUfcAfTsT | 685 | UGACCucGUggCCUCAgcaTsT | 686 | AD-14712 |
| 2024-2042 | UfGCfUfGAGGCfCfACfGAGGUfCfATsT | 687 | UGACCucGUggCCUCAgcaTsT | 688 | AD-14722 |
| 2024-2042 | UgCuGaGgCcAcGaGgUcATsT | 689 | UGACCucGUggCCUCAgcaTsT | 690 | AD-14732 |
| 2024-2042 | GfuGfgUfcAfgCfgGfcCfgGfgAfuGfTsT | 691 | p-cAMCfcCfgGfcCfgCfuGfaCfcAfcTsT | 692 | AD-15078 |
| 2024-2042 | GUfGGUfCfAGCfGGCfCfGGGAUfGTsT | 693 | CfAUfCfCfCfGGCfCfGCfUfGACfCfACfTsT | 694 | AD-15088 |
| 2024-2042 | GuGgUcAgCgGcCgGgAuGTsT | 695 | p-cAMCfcCfgGfcCfgCfuGfaCfcAfcTsT | 696 | AD-15098 |
| 2024-2042 | GuGgUcAgCgGcCgGgAuGTsT | 697 | CfAUfCfCfCfGGCfCfGCfUfGACfCfACfTsT | 698 | AD-15108 |
| 2024-2042 | GfuGfgUfcAfgCfgGfcCfgGfgAfuGfTsT | 699 | CAUCCcgGCcgCUGACcacTsT | 700 | AD-15118 |
| 2024-2042 | GUfGGUfCfAGCfGGCfCfGGGAUfGTsT | 701 | CAUCCcgGCcgCUGACcacTsT | 702 | AD-15128 |
| 2024-2042 | GuGgUcAgCgGcCgGgAuGTsT | 703 | CAUCCcgGCcgCUGACcacTsT | 704 | AD-15138 |
| 2030-2048 | GGCCACGAGGUCAGCCCAATT | 705 | UUGGGCUGACCUCGUGGCCTT | 706 | AD-15237 |
| 2035-2053 | CGAGGUCAGCCCAACCAGUTT | 707 | ACUGGUUGGGCUGACCUCGTT | 708 | AD-15287 |
| 2039-2057 | GUCAGCCCAACCAGUGCGUTT | 709 | ACGCACUGGUUGGGCUGACTT | 710 | AD-15238 |
| 2041-2059 | CAGCCCAACCAGUGCGUGGTT | 711 | CCACGCACUGGUUGGGCUGTT | 712 | AD-15328 |
| 2062-2080 | CACAGGGAGGCCAGCAUCCTT | 713 | GGAUGCUGGCCUCCCUGUGTT | 714 | AD-15399 |
| 2072-2090 | CCAGCAUCCACGCUUCCUGTsT | 715 | CAGGAAGCGUGGAUGCUGGTsT | 716 | AD-9582 |
| 2072-2090 | ccAGcAuccAcGcuuccuGTsT | 717 | cAGGAAGCGUGGAUGCUGGTsT | 718 | AD-9708 |
| 2118-2136 | AGUCAAGGAGCAUGGAAUCTsT | 719 | GAUUCCAUGCUCCUUGACUTsT | 720 | AD-9545 |
| 2118-2136 | AGucAAGGAGcAuGGAAucTsT | 721 | GAUUCcAUGCUCCUUGACUTsT | 722 | AD-9671 |
| 2118-2136 | AfgUfcAfaGfgAfgCfaUfgGfaAfuCfTsT | 723 | p-gAfuUfcCfaUfgCfuCfcUfuGfaCfuTsT | 724 | AD-14674 |
| 2118-2136 | AGUfCfAAGGAGCfAUfGGAAUfCfTsT | 725 | GAUfUfCfCfAUfGCfUfCfCfUfUfGACfUfTsT | 726 | AD-14684 |
| 2118-2136 | AgUcAaGgAgCaUgGaAuCTsT | 727 | p-gAfuUfcCfaUfgCfuCfcUfuGfaCfuTsT | 728 | AD-14694 |
| 2118-2136 | AgUcAaGgAgCaUgGaAuCTsT | 729 | GAUfUfCfCfAUfGCfUfCfCfUfUfGACfUfTsT | 730 | AD-14704 |
| 2118-2136 | AfgUfcAfaGfgAfgCfaUfgGfaAfuCfTsT | 731 | GAUUCcaUGcuCCUUGacuTsT | 732 | AD-14714 |
| 2118-2136 | AGUfCfAAGGAGCfAUfGGAAUfCfTsT | 733 | GAUUCcaUGcuCCUUGacuTsT | 734 | AD-14724 |
| 2118-2136 | AgUcAaGgAgCaUgGaAuCTsT | 735 | GAUUCcaUGcuCCUUGacuTsT | 736 | AD-14734 |
| 2118-2136 | GfcGfgCfaCfcCfuCfaUfaGfgCfcUfTsT | 737 | p-aGfgCfcUfaUfgAfgGfgUfgCfcGfcTsT | 738 | AD-15080 |
| 2118-2136 | GCfGGCfACfCfCfUfCfAUfAGGCfCfUfTsT | 739 | AGGCfCfUfAUfGAGGGUfGCfCfGCfTsT | 740 | AD-15090 |
| 2118-2136 | GcGgCaCcCuCaUaGgCcUTsT | 741 | p-aGfgCfcUfaUfgAfgGfgUfgCfcGfcTsT | 742 | AD-15100 |
| 2118-2136 | GcGgCaCcCuCaUaGgCcUTsT | 743 | AGGCfCfUfAUfGAGGGUfGCfCfGCfTsT | 744 | AD-15110 |
| 2118-2136 | GfcGfgCfaCfcCfuCfaUfaGfgCfcUfTsT | 745 | AGGCCuaUGagGGUGCcgcTsT | 746 | AD-15120 |
| 2118-2136 | GCfGGCfACfCfCfUfCfAUfAGGCfCfUfTsT | 747 | AGGCCuaUGagGGUGCcgcTsT | 748 | AD-15130 |
| 2118-2136 | GcGgCaCcCuCaUaGgCcUTsT | 749 | AGGCCuaUGagGGUGCcgcTsT | 750 | AD-15140 |
| 2122-2140 | AAGGAGCAUGGAAUCCCGGTsT | 751 | CCGGGAUUCCAUGCUCCUUTsT | 752 | AD-9522 |
| 2122-2140 | AAGGAGcAuGGAAucccGGTsT | 753 | CCGGGAUUCcAUGCUCCUUTsT | 754 | AD-9648 |
| 2123-2141 | AGGAGCAUGGAAUCCCGGCTsT | 755 | GCCGGGAUUCCAUGCUCCUTsT | 756 | AD-9552 |
| 2123-2141 | AGGAGcAuGGAAucccGGcTsT | 757 | GCCGGGAUUCcAUGCUCCUTsT | 758 | AD-9678 |
| 2125-2143 | GAGCAUGGAAUCCCGGCCCTsT | 759 | GGGCCGGGAUUCCAUGCUCTsT | 760 | AD-9618 |
| 2125-2143 | GAGcAuGGAAucccGGcccTsT | 761 | GGGCCGGGAUUCcAUGCUCTsT | 762 | AD-9744 |
| 2230-2248 | GCCUACGCCGUAGACAACATT | 763 | UGUUGUCUACGGCGUAGGCTT | 764 | AD-15239 |
| 2231-2249 | CCUACGCCGUAGACAACACTT | 765 | GUGUUGUCUACGGCGUAGGTT | 766 | AD-15212 |
| 2232-2250 | CUACGCCGUAGACAACACGTT | 767 | CGUGUUGUCUACGGCGUAGTT | 768 | AD-15240 |
| 2233-2251 | UACGCCGUAGACAACACGUTT | 769 | ACGUGUUGUCUACGGCGUATT | 770 | AD-15177 |
| 2235-2253 | CGCCGUAGACAACACGUGUTT | 771 | ACACGUGUUGUCUACGGCGTT | 772 | AD-15179 |
| 2236-2254 | GCCGUAGACAACACGUGUGTT | 773 | CACACGUGUUGUCUACGGCTT | 774 | AD-15180 |
| 2237-2255 | CCGUAGACAACACGUGUGUTT | 775 | ACACACGUGUUGUCUACGGTT | 776 | AD-15241 |
| 2238-2256 | CGUAGACAACACGUGUGUATT | 777 | UACACACGUGUUGUCUACGTT | 778 | AD-15268 |
| 2240-2258 | UAGACAACACGUGUGUAGUTT | 779 | ACUACACACGUGUUGUCUATT | 780 | AD-15242 |
| 2241-2259 | AGACAACACGUGUGUAGUCTT | 781 | GACUACACACGUGUUGUCUTT | 782 | AD-15216 |
| 2242-2260 | GACAACACGUGUGUAGUCATT | 783 | UGACUACACACGUGUUGUCTT | 784 | AD-15176 |
| 2243-2261 | ACAACACGUGUGUAGUCAGTT | 785 | CUGACUACACACGUGUUGUTT | 786 | AD-15181 |
| 2244-2262 | CAACACGUGUGUAGUCAGGTT | 787 | CCUGACUACACACGUGUUGTT | 788 | AD-15243 |
| 2247-2265 | CACGUGUGUAGUCAGGAGCTT | 789 | GCUCCUGACUACACACGUGTT | 790 | AD-15182 |
| 2248-2266 | ACGUGUGUAGUCAGGAGCCTT | 791 | GGCUCCUGACUACACACGUTT | 792 | AD-15244 |
| 2249-2267 | CGUGUGUAGUCAGGAGCCGTT | 793 | CGGCUCCUGACUACACACGTT | 794 | AD-15387 |
| 2251-2269 | UGUGUAGUCAGGAGCCGGGTT | 795 | CCCGGCUCCUGACUACACATT | 796 | AD-15245 |
| 2257-2275 | GUCAGGAGCCGGGACGUCATsT | 797 | UGACGUCCCGGCUCCUGACTsT | 798 | AD-9555 |
| 2257-2275 | GucAGGAGccGGGAcGucATsT | 799 | UGACGUCCCGGCUCCUGACTsT | 800 | AD-9681 |
| 2258-2276 | UCAGGAGCCGGGACGUCAGTsT | 801 | CUGACGUCCCGGCUCCUGATsT | 802 | AD-9619 |
| 2258-2276 | ucAGGAGccGGGAcGucAGTsT | 803 | CUGACGUCCCGGCUCCUGATsT | 804 | AD-9745 |
| 2259-2277 | CAGGAGCCGGGACGUCAGCTsT | 805 | GCUGACGUCCCGGCUCCUGTsT | 806 | AD-9620 |
| 2259-2277 | cAGGAGccGGGAcGucAGcTsT | 807 | GCUGACGUCCCGGCUCCUGTsT | 808 | AD-9746 |
| 2263-2281 | AGCCGGGACGUCAGCACUATT | 809 | UAGUGCUGACGUCCCGGCUTT | 810 | AD-15288 |
| 2265-2283 | CCGGGACGUCAGCACUACATT | 811 | UGUAGUGCUGACGUCCCGGTT | 812 | AD-15246 |
| 2303-2321 | CCGUGACAGCCGUUGCCAUTT | 813 | AUGGCAACGGCUGUCACGGTT | 814 | AD-15289 |
| 2317-2335 | GCCAUCUGCUGCCGGAGCCTsT | 815 | GGCUCCGGCAGCAGAUGGCTsT | 816 | AD-9324 |
| 2375-2393 | CCCAUCCCAGGAUGGGUGUTT | 817 | ACACCCAUCCUGGGAUGGGTT | 818 | AD-15329 |
| 2377-2395 | CAUCCCAGGAUGGGUGUCUTT | 819 | AGACACCCAUCCUGGGAUGTT | 820 | AD-15330 |
| 2420-2438 | AGCUUUAAAAUGGUUCCGATT | 821 | UCGGAACCAUUUUAAAGCUTT | 822 | AD-15169 |
| 2421-2439 | GCUUUAAAAUGGUUCCGACTT | 823 | GUCGGAACCAUUUUAAAGCTT | 824 | AD-15201 |
| 2422-2440 | CUUUAAAAUGGUUCCGACUTT | 825 | AGUCGGAACCAUUUUAAAGTT | 826 | AD-15331 |
| 2423-2441 | UUUAAAAUGGUUCCGACUUTT | 827 | AAGUCGGAACCAUUUUAAATT | 828 | AD-15190 |
| 2424-2442 | UUAAAAUGGUUCCGACUUGTT | 829 | CAAGUCGGAACCAUUUUAATT | 830 | AD-15247 |
| 2425-2443 | UAAAAUGGUUCCGACUUGUTT | 831 | ACAAGUCGGAACCAUUUUATT | 832 | AD-15248 |
| 2426-2444 | AAAAUGGUUCCGACUUGUCTT | 833 | GACAAGUCGGAACCAUUUUTT | 834 | AD-15175 |
| 2427-2445 | AAAUGGUUCCGACUUGUCCTT | 835 | GGACAAGUCGGAACCAUUUTT | 836 | AD-15249 |
| 2428-2446 | AAUGGUUCCGACUUGUCCCTT | 837 | GGGACAAGUCGGAACCAUUTT | 838 | AD-15250 |
| 2431-2449 | GGUUCCGACUUGUCCCUCUTT | 839 | AGAGGGACAAGUCGGAACCTT | 840 | AD-15400 |
| 2457-2475 | CUCCAUGGCCUGGCACGAGTT | 841 | CUCGUGCCAGGCCAUGGAGTT | 842 | AD-15332 |
| 2459-2477 | CCAUGGCCUGGCACGAGGGTT | 843 | CCCUCGUGCCAGGCCAUGGTT | 844 | AD-15388 |
| 2545-2563 | GAACUCACUCACUCUGGGUTT | 845 | ACCCAGAGUGAGUGAGUUCTT | 846 | AD-15333 |
| 2549-2567 | UCACUCACUCUGGGUGCCUTT | 847 | AGGCACCCAGAGUGAGUGATT | 848 | AD-15334 |
| 2616-2634 | UUUCACCAUUCAAACAGGUTT | 849 | ACCUGUUUGAAUGGUGAAATT | 850 | AD-15335 |
| 2622-2640 | CAUUCAAACAGGUCGAGCUTT | 851 | AGCUCGACCUGUUUGAAUGTT | 852 | AD-15183 |
| 2623-2641 | AUUCAAACAGGUCGAGCUGTT | 853 | CAGCUCGACCUGUUUGAAUTT | 854 | AD-15202 |
| 2624-2642 | UUCAAACAGGUCGAGCUGUTT | 855 | ACAGCUCGACCUGUUUGAATT | 856 | AD-15203 |
| 2625-2643 | UCAAACAGGUCGAGCUGUGTT | 857 | CACAGCUCGACCUGUUUGATT | 858 | AD-15272 |
| 2626-2644 | CAAACAGGUCGAGCUGUGCTT | 859 | GCACAGCUCGACCUGUUUGTT | 860 | AD-15217 |
| 2627-2645 | AAACAGGUCGAGCUGUGCUTT | 861 | AGCACAGCUCGACCUGUUUTT | 862 | AD-15290 |
| 2628-2646 | AACAGGUCGAGCUGUGCUCTT | 863 | GAGCACAGCUCGACCUGUUTT | 864 | AD-15218 |
| 2630-2648 | CAGGUCGAGCUGUGCUCGGTT | 865 | CCGAGCACAGCUCGACCUGTT | 866 | AD-15389 |
| 2631-2649 | AGGUCGAGCUGUGCUCGGGTT | 867 | CCCGAGCACAGCUCGACCUTT | 868 | AD-15336 |
| 2633-2651 | GUCGAGCUGUGCUCGGGUGTT | 869 | CACCCGAGCACAGCUCGACTT | 870 | AD-15337 |
| 2634-2652 | UCGAGCUGUGCUCGGGUGCTT | 871 | GCACCCGAGCACAGCUCGATT | 872 | AD-15191 |
| 2657-2675 | AGCUGCUCCCAAUGUGCCGTT | 873 | CGGCACAUUGGGAGCAGCUTT | 874 | AD-15390 |
| 2658-2676 | GCUGCUCCCAAUGUGCCGATT | 875 | UCGGCACAUUGGGAGCAGCTT | 876 | AD-15338 |
| 2660-2678 | UGCUCCCAAUGUGCCGAUGTT | 877 | CAUCGGCACAUUGGGAGCATT | 878 | AD-15204 |
| 2663-2681 | UCCCAAUGUGCCGAUGUCCTT | 879 | GGACAUCGGCACAUUGGGATT | 880 | AD-15251 |
| 2665-2683 | CCAAUGUGCCGAUGUCCGUTT | 881 | ACGGACAUCGGCACAUUGGTT | 882 | AD-15205 |
| 2666-2684 | CAAUGUGCCGAUGUCCGUGTT | 883 | CACGGACAUCGGCACAUUGTT | 884 | AD-15171 |
| 2667-2685 | AAUGUGCCGAUGUCCGUGGTT | 885 | CCACGGACAUCGGCACAUUTT | 886 | AD-15252 |
| 2673-2691 | CCGAUGUCCGUGGGCAGAATT | 887 | UUCUGCCCACGGACAUCGGTT | 888 | AD-15339 |
| 2675-2693 | GAUGUCCGUGGGCAGAAUGTT | 889 | CAUUCUGCCCACGGACAUCTT | 890 | AD-15253 |
| 2678-2696 | GUCCGUGGGCAGAAUGACUTT | 891 | AGUCAUUCUGCCCACGGACTT | 892 | AD-15340 |
| 2679-2697 | UCCGUGGGCAGAAUGACUUTT | 893 | AAGUCAUUCUGCCCACGGATT | 894 | AD-15291 |
| 2683-2701 | UGGGCAGAAUGACUUUUAUTT | 895 | AUAAAAGUCAUUCUGCCCATT | 896 | AD-15341 |
| 2694-2712 | ACUUUUAUUGAGCUCUUGUTT | 897 | ACAAGAGCUCAAUAAAAGUTT | 898 | AD-15401 |
| 2700-2718 | AUUGAGCUCUUGUUCCGUGTT | 899 | CACGGAACAAGAGCUCAAUTT | 900 | AD-15342 |
| 2704-2722 | AGCUCUUGUUCCGUGCCAGTT | 901 | CUGGCACGGAACAAGAGCUTT | 902 | AD-15343 |
| 2705-2723 | GCUCUUGUUCCGUGCCAGGTT | 903 | CCUGGCACGGAACAAGAGCTT | 904 | AD-15292 |
| 2710-2728 | UGUUCCGUGCCAGGCAUUCTT | 905 | GAAUGCCUGGCACGGAACATT | 906 | AD-15344 |
| 2711-2729 | GUUCCGUGCCAGGCAUUCATT | 907 | UGAAUGCCUGGCACGGAACTT | 908 | AD-15254 |
| 2712-2730 | UUCCGUGCCAGGCAUUCAATT | 909 | UUGAAUGCCUGGCACGGAATT | 910 | AD-15345 |
| 2715-2733 | CGUGCCAGGCAUUCAAUCCTT | 911 | GGAUUGAAUGCCUGGCACGTT | 912 | AD-15206 |
| 2716-2734 | GUGCCAGGCAUUCAAUCCUTT | 913 | AGGAUUGAAUGCCUGGCACTT | 914 | AD-15346 |
| 2728-2746 | CAAUCCUCAGGUCUCCACCTT | 915 | GGUGGAGACCUGAGGAUUGTT | 916 | AD-15347 |
| 2743-2761 | CACCAAGGAGGCAGGAUUCTsT | 917 | GAAUCCUGCCUCCUUGGUGTsT | 918 | AD-9577 |
| 2743-2761 | cAccAAGGAGGcAGGAuucTsT | 919 | GAAUCCUGCCUCCUUGGUGTsT | 920 | AD-9703 |
| 2743-2761 | CfaCfcAfaGfgAfgGfcAfgGfaUfuCfTsT | 921 | p-gAfaUfcCfuGfcCfuCfcUfuGfgUfgTsT | 922 | AD-14678 |
| 2743-2761 | CfACfCfAAGGAGGCfAGGAUfUfCfTsT | 923 | GAAUfCfCfUfGCfCfUfCfCfUfUfGGUfGTsT | 924 | AD-14688 |
| 2743-2761 | CaCcAaGgAgGcAgGaUuCTsT | 925 | p-gAfaUfcCfuGfcCfuCfcUfuGfgUfgTsT | 926 | AD-14698 |
| 2743-2761 | CaCcAaGgAgGcAgGaUuCTsT | 927 | GAAUfCfCfUfGCfCfUfCfCfUfUfGGUfGTsT | 928 | AD-14708 |
| 2743-2761 | CfaCfcAfaGfgAfgGfcAfgGfaUfuCfTsT | 929 | GAAUCcuGCcuCCUUGgugTsT | 930 | AD-14718 |
| 2743-2761 | CfACfCfAAGGAGGCfAGGAUfUfCfTsT | 931 | GAAUCcuGCcuCCUUGgugTsT | 932 | AD-14728 |
| 2743-2761 | CaCcAaGgAgGcAgGaUuCTsT | 933 | GAAUCcuGCcuCCUUGgugTsT | 934 | AD-14738 |
| 1090-1108 | GfgCfcUfgGfaGfuUfuAfuUfcGfgAfTsT | 935 | p-uCfcGfaAfuAfaAfcUfcCfaGfgCfcTsT | 936 | AD-15084 |
| 1090-1108 | GGCfCfUfGGAGUfUfUfAUfUfCfGGATsT | 937 | UfCfCfGAAUfAAACfUfCfCfAGGCfCfTsT | 938 | AD-15094 |
| 1090-1108 | GgCcUgGaGuUuAuUcGgATsT | 939 | p-uCfcGfaAfuAfaAfcUfcCfaGfgCfcTsT | 940 | AD-15104 |
| 1090-1108 | GgCcUgGaGuUuAuUcGgATsT | 941 | UfCfCfGAAUfAAACfUfCfCfAGGCfCfTsT | 942 | AD-15114 |
| 1090-1108 | GfgCfcUfgGfaGfuUfuAfuUfcGfgAfTsT | 943 | UCCGAauAAacUCCAGgccTsT | 944 | AD-15124 |
| 1090-1108 | GGCfCfUfGGAGUfUfUfAUfUfCfGGATsT | 945 | UCCGAauAAacUCCAGgccTsT | 946 | AD-15134 |
| 1090-1108 | GgCcUgGaGuUuAuUcGgATsT | 947 | UCCGAauAAacUCCAGgccTsT | 948 | AD-15144 |
| 2753-2771 | GCAGGAUUCUUCCCAUGGATT | 949 | UCCAUGGGAAGAAUCCUGCTT | 950 | AD-15391 |
| 2794-2812 | UGCAGGGACAAACAUCGUUTT | 951 | AACGAUGUUUGUCCCUGCATT | 952 | AD-15348 |
| 2795-2813 | GCAGGGACAAACAUCGUUGTT | 953 | CAACGAUGUUUGUCCCUGCTT | 954 | AD-15349 |
| 2797-2815 | AGGGACAAACAUCGUUGGGTT | 955 | CCCAACGAUGUUUGUCCCUTT | 956 | AD-15170 |
| 2841-2859 | CCCUCAUCUCCAGCUAACUTT | 957 | AGUUAGCUGGAGAUGAGGGTT | 958 | AD-15350 |
| 2845-2863 | CAUCUCCAGCUAACUGUGGTT | 959 | CCACAGUUAGCUGGAGAUGTT | 960 | AD-15402 |
| 2878-2896 | GCUCCCUGAUUAAUGGAGGTT | 961 | CCUCCAUUAAUCAGGGAGCTT | 962 | AD-15293 |
| 2881-2899 | CCCUGAUUAAUGGAGGCUUTT | 963 | AAGCCUCCAUUAAUCAGGGTT | 964 | AD-15351 |
| 2882-2900 | CCUGAUUAAUGGAGGCUUATT | 965 | UAAGCCUCCAUUAAUCAGGTT | 966 | AD-15403 |
| 2884-2902 | UGAUUAAUGGAGGCUUAGCTT | 967 | GCUAAGCCUCCAUUAAUCATT | 968 | AD-15404 |
| 2885-2903 | GAUUAAUGGAGGCUUAGCUTT | 969 | AGCUAAGCCUCCAUUAAUCTT | 970 | AD-15207 |
| 2886-2904 | AUUAAUGGAGGCUUAGCUUTT | 971 | AAGCUAAGCCUCCAUUAAUTT | 972 | AD-15352 |
| 2887-2905 | UUAAUGGAGGCUUAGCUUUTT | 973 | AAAGCUAAGCCUCCAUUAATT | 974 | AD-15255 |
| 2903-2921 | UUUCUGGAUGGCAUCUAGCTsT | 975 | GCUAGAUGCCAUCCAGAAATsT | 976 | AD-9603 |
| 2903-2921 | uuucuGGAuGGcAucuAGcTsT | 977 | GCuAGAUGCcAUCcAGAAATsT | 978 | AD-9729 |
| 2904-2922 | UUCUGGAUGGCAUCUAGCCTsT | 979 | GGCUAGAUGCCAUCCAGAATsT | 980 | AD-9599 |
| 2904-2922 | uucuGGAuGGcAucuAGccTsT | 981 | GGCuAGAUGCcAUCcAGAATsT | 982 | AD-9725 |
| 2905-2923 | UCUGGAUGGCAUCUAGCCATsT | 983 | UGGCUAGAUGCCAUCCAGATsT | 984 | AD-9621 |
| 2905-2923 | ucuGGAuGGcAucuAGccATsT | 985 | UGGCuAGAUGCcAUCcAGATsT | 986 | AD-9747 |
| 2925-2943 | AGGCUGGAGACAGGUGCGCTT | 987 | GCGCACCUGUCUCCAGCCUTT | 988 | AD-15405 |
| 2926-2944 | GGCUGGAGACAGGUGCGCCTT | 989 | GGCGCACCUGUCUCCAGCCTT | 990 | AD-15353 |
| 2927-2945 | GCUGGAGACAGGUGCGCCCTT | 991 | GGGCGCACCUGUCUCCAGCTT | 992 | AD-15354 |
| 2972-2990 | UUCCUGAGCCACCUUUACUTT | 993 | AGUAAAGGUGGCUCAGGAATT | 994 | AD-15406 |
| 2973-2991 | UCCUGAGCCACCUUUACUCTT | 995 | GAGUAAAGGUGGCUCAGGATT | 996 | AD-15407 |
| 2974-2992 | CCUGAGCCACCUUUACUCUTT | 997 | AGAGUAAAGGUGGCUCAGGTT | 998 | AD-15355 |
| 2976-2994 | UGAGCCACCUUUACUCUGCTT | 999 | GCAGAGUAAAGGUGGCUCATT | 1000 | AD-15356 |
| 2978-2996 | AGCCACCUUUACUCUGCUCTT | 1001 | GAGCAGAGUAAAGGUGGCUTT | 1002 | AD-15357 |
| 2981-2999 | CACCUUUACUCUGCUCUAUTT | 1003 | AUAGAGCAGAGUAAAGGUGTT | 1004 | AD-15269 |
| 2987-3005 | UACUCUGCUCUAUGCCAGGTsT | 1005 | CCUGGCAUAGAGCAGAGUATsT | 1006 | AD-9565 |
| 2987-3005 | uAcucuGcucuAuGccAGGTsT | 1007 | CCUGGcAuAGAGcAGAGuATsT | 1008 | AD-9691 |
| 2998-3016 | AUGCCAGGCUGUGCUAGCATT | 1009 | UGCUAGCACAGCCUGGCAUTT | 1010 | AD-15358 |
| 3003-3021 | AGGCUGUGCUAGCAACACCTT | 1011 | GGUGUUGCUAGCACAGCCUTT | 1012 | AD-15359 |
| 3006-3024 | CUGUGCUAGCAACACCCAATT | 1013 | UUGGGUGUUGCUAGCACAGTT | 1014 | AD-15360 |
| 3010-3028 | GCUAGCAACACCCAAAGGUTT | 1015 | ACCUUUGGGUGUUGCUAGCTT | 1016 | AD-15219 |
| 3038-3056 | GGAGCCAUCACCUAGGACUTT | 1017 | AGUCCUAGGUGAUGGCUCCTT | 1018 | AD-15361 |
| 3046-3064 | CACCUAGGACUGACUCGGCTT | 1019 | GCCGAGUCAGUCCUAGGUGTT | 1020 | AD-15273 |
| 3051-3069 | AGGACUGACUCGGCAGUGUTT | 1021 | ACACUGCCGAGUCAGUCCUTT | 1022 | AD-15362 |
| 3052-3070 | GGACUGACUCGGCAGUGUGTT | 1023 | CACACUGCCGAGUCAGUCCTT | 1024 | AD-15192 |
| 3074-3092 | UGGUGCAUGCACUGUCUCATT | 1025 | UGAGACAGUGCAUGCACCATT | 1026 | AD-15256 |
| 3080-3098 | AUGCACUGUCUCAGCCAACTT | 1027 | GUUGGCUGAGACAGUGCAUTT | 1028 | AD-15363 |
| 3085-3103 | CUGUCUCAGCCAACCCGCUTT | 1029 | AGCGGGUUGGCUGAGACAGTT | 1030 | AD-15364 |
| 3089-3107 | CUCAGCCAACCCGCUCCACTsT | 1031 | GUGGAGCGGGUUGGCUGAGTsT | 1032 | AD-9604 |
| 3089-3107 | cucAGccAAcccGcuccAcTsT | 1033 | GUGGAGCGGGUUGGCUGAGTsT | 1034 | AD-9730 |
| 3093-3111 | GCCAACCCGCUCCACUACCTsT | 1035 | GGUAGUGGAGCGGGUUGGCTsT | 1036 | AD-9527 |
| 3093-3111 | GccAAcccGcuccAcuAccTsT | 1037 | GGuAGUGGAGCGGGUUGGCTsT | 1038 | AD-9653 |
| 3096-3114 | AACCCGCUCCACUACCCGGTT | 1039 | CCGGGUAGUGGAGCGGGUUTT | 1040 | AD-15365 |
| 3099-3117 | CCGCUCCACUACCCGGCAGTT | 1041 | CUGCCGGGUAGUGGAGCGGTT | 1042 | AD-15294 |
| 3107-3125 | CUACCCGGCAGGGUACACATT | 1043 | UGUGUACCCUGCCGGGUAGTT | 1044 | AD-15173 |
| 3108-3126 | UACCCGGCAGGGUACACAUTT | 1045 | AUGUGUACCCUGCCGGGUATT | 1046 | AD-15366 |
| 3109-3127 | ACCCGGCAGGGUACACAUUTT | 1047 | AAUGUGUACCCUGCCGGGUTT | 1048 | AD-15367 |
| 3110-3128 | CCCGGCAGGGUACACAUUCTT | 1049 | GAAUGUGUACCCUGCCGGGTT | 1050 | AD-15257 |
| 3112-3130 | CGGCAGGGUACACAUUCGCTT | 1051 | GCGAAUGUGUACCCUGCCGTT | 1052 | AD-15184 |
| 3114-3132 | GCAGGGUACACAUUCGCACTT | 1053 | GUGCGAAUGUGUACCCUGCTT | 1054 | AD-15185 |
| 3115-3133 | CAGGGUACACAUUCGCACCTT | 1055 | GGUGCGAAUGUGUACCCUGTT | 1056 | AD-15258 |
| 3116-3134 | AGGGUACACAUUCGCACCCTT | 1057 | GGGUGCGAAUGUGUACCCUTT | 1058 | AD-15186 |
| 3196-3214 | GGAACUGAGCCAGAAACGCTT | 1059 | GCGUUUCUGGCUCAGUUCCTT | 1060 | AD-15274 |
| 3197-3215 | GAACUGAGCCAGAAACGCATT | 1061 | UGCGUUUCUGGCUCAGUUCTT | 1062 | AD-15368 |
| 3198-3216 | AACUGAGCCAGAAACGCAGTT | 1063 | CUGCGUUUCUGGCUCAGUUTT | 1064 | AD-15369 |
| 3201-3219 | UGAGCCAGAAACGCAGAUUTT | 1065 | AAUCUGCGUUUCUGGCUCATT | 1066 | AD-15370 |
| 3207-3225 | AGAAACGCAGAUUGGGCUGTT | 1067 | CAGCCCAAUCUGCGUUUCUTT | 1068 | AD-15259 |
| 3210-3228 | AACGCAGAUUGGGCUGGCUTT | 1069 | AGCCAGCCCAAUCUGCGUUTT | 1070 | AD-15408 |
| 3233-3251 | AGCCAAGCCUCUUCUUACUTsT | 1071 | AGUAAGAAGAGGCUUGGCUTsT | 1072 | AD-9597 |
| 3233-3251 | AGccAAGccucuucuuAcuTsT | 1073 | AGuAAGAAGAGGCUUGGCUTsT | 1074 | AD-9723 |
| 3233-3251 | AfgCfcAfaGfcCfuCfuUfcUfuAfcUfTsT | 1075 | p-aGfuAfaGfaAfgAfgGfcUfuGfgCfuTsT | 1076 | AD-14680 |
| 3233-3251 | AGCfCfAAGCfCfUfCfUfUfCfUfUfACfUfTsT | 1077 | AGUfAAGAAGAGGCfUfUfGGCfUfTsT | 1078 | AD-14690 |
| 3233-3251 | AgCcAaGcCuCuUcUuAcUTsT | 1079 | p-aGfuAfaGfaAfgAfgGfcUfuGfgCfuTsT | 1080 | AD-14700 |
| 3233-3251 | AgCcAaGcCuCuUcUuAcUTsT | 1081 | AGUfAAGAAGAGGCfUfUfGGCfUfTsT | 1082 | AD-14710 |
| 3233-3251 | AfgCfcAfaGfcCfuCfuUfcUfuAfcUfTsT | 1083 | AGUAAgaAGagGCUUGgcuTsT | 1084 | AD-14720 |
| 3233-3251 | AGCfCfAAGCfCfUfCfUfUfCfUfUfACfUfTsT | 1085 | AGUAAgaAGagGCUUGgcuTsT | 1086 | AD-14730 |
| 3233-3251 | AgCcAaGcCuCuUcUuAcUTsT | 1087 | AGUAAgaAGagGCUUGgcuTsT | 1088 | AD-14740 |
| 3233-3251 | UfgGfuUfcCfcUfgAfgGfaCfcAfgCfTsT | 1089 | p-gCfuGfgUfcCfuCfaGfgGfaAfcCfaTsT | 1090 | AD-15086 |
| 3233-3251 | UfGGUfUfCfCfCfUfGAGGACfCfAGCfTsT | 1091 | GCfUfGGUfCfCfUfCfAGGGAACfCfATsT | 1092 | AD-15096 |
| 3233-3251 | UgGuUcCcUgAgGaCcAgCTsT | 1093 | p-gCfuGfgUfcCfuCfaGfgGfaAfcCfaTsT | 1094 | AD-15106 |
| 3233-3251 | UgGuUcCcUgAgGaCcAgCTsT | 1095 | GCfUfGGUfCfCfUfCfAGGGAACfCfATsT | 1096 | AD-15116 |
| 3233-3251 | UfgGfuUfcCfcUfgAfgGfaCfcAfgCfTsT | 1097 | GCUGGucCUcaGGGAAccaTsT | 1098 | AD-15126 |
| 3233-3251 | UfGGUfUfCfCfCfUfGAGGACfCfAGCfTsT | 1099 | GCUGGucCUcaGGGAAccaTsT | 1100 | AD-15136 |
| 3233-3251 | UgGuUcCcUgAgGaCcAgCTsT | 1101 | GCUGGucCUcaGGGAAccaTsT | 1102 | AD-15146 |
| 3242-3260 | UCUUCUUACUUCACCCGGCTT | 1103 | GCCGGGUGAAGUAAGAAGATT | 1104 | AD-15260 |
| 3243-3261 | CUUCUUACUUCACCCGGCUTT | 1105 | AGCCGGGUGAAGUAAGAAGTT | 1106 | AD-15371 |
| 3244-3262 | UUCUUACUUCACCCGGCUGTT | 1107 | CAGCCGGGUGAAGUAAGAATT | 1108 | AD-15372 |
| 3262-3280 | GGGCUCCUCAUUUUUACGGTT | 1109 | CCGUAAAAAUGAGGAGCCCTT | 1110 | AD-15172 |
| 3263-3281 | GGCUCCUCAUUUUUACGGGTT | 1111 | CCCGUAAAAAUGAGGAGCCTT | 1112 | AD-15295 |
| 3264-3282 | GCUCCUCAUUUUUACGGGUTT | 1113 | ACCCGUAAAAAUGAGGAGCTT | 1114 | AD-15373 |
| 3265-3283 | CUCCUCAUUUUUACGGGUATT | 1115 | UACCCGUAAAAAUGAGGAGTT | 1116 | AD-15163 |
| 3266-3284 | UCCUCAUUUUUACGGGUAATT | 1117 | UUACCCGUAAAAAUGAGGATT | 1118 | AD-15165 |
| 3267-3285 | CCUCAUUUUUACGGGUAACTT | 1119 | GUUACCCGUAAAAAUGAGGTT | 1120 | AD-15374 |
| 3268-3286 | CUCAUUUUUACGGGUAACATT | 1121 | UGUUACCCGUAAAAAUGAGTT | 1122 | AD-15296 |
| 3270-3288 | CAUUUUUACGGGUAACAGUTT | 1123 | ACUGUUACCCGUAAAAAUGTT | 1124 | AD-15261 |
| 3271-3289 | AUUUUUACGGGUAACAGUGTT | 1125 | CACUGUUACCCGUAAAAAUTT | 1126 | AD-15375 |
| 3274-3292 | UUUACGGGUAACAGUGAGGTT | 1127 | CCUCACUGUUACCCGUAAATT | 1128 | AD-15262 |
| 3308-3326 | CAGACCAGGAAGCUCGGUGTT | 1129 | CACCGAGCUUCCUGGUCUGTT | 1130 | AD-15376 |
| 3310-3328 | GACCAGGAAGCUCGGUGAGTT | 1131 | CUCACCGAGCUUCCUGGUCTT | 1132 | AD-15377 |
| 3312-3330 | CCAGGAAGCUCGGUGAGUGTT | 1133 | CACUCACCGAGCUUCCUGGTT | 1134 | AD-15409 |
| 3315-3333 | GGAAGCUCGGUGAGUGAUGTT | 1135 | CAUCACUCACCGAGCUUCCTT | 1136 | AD-15378 |
| 3324-3342 | GUGAGUGAUGGCAGAACGATT | 1137 | UCGUUCUGCCAUCACUCACTT | 1138 | AD-15410 |
| 3326-3344 | GAGUGAUGGCAGAACGAUGTT | 1139 | CAUCGUUCUGCCAUCACUCTT | 1140 | AD-15379 |
| 3330-3348 | GAUGGCAGAACGAUGCCUGTT | 1141 | CAGGCAUCGUUCUGCCAUCTT | 1142 | AD-15187 |
| 3336-3354 | AGAACGAUGCCUGCAGGCATT | 1143 | UGCCUGCAGGCAUCGUUCUTT | 1144 | AD-15263 |
| 3339-3357 | ACGAUGCCUGCAGGCAUGGTT | 1145 | CCAUGCCUGCAGGCAUCGUTT | 1146 | AD-15264 |
| 3348-3366 | GCAGGCAUGGAACUUUUUCTT | 1147 | GAAAAAGUUCCAUGCCUGCTT | 1148 | AD-15297 |
| 3356-3374 | GGAACUUUUUCCGUUAUCATT | 1149 | UGAUAACGGAAAAAGUUCCTT | 1150 | AD-15208 |
| 3357-3375 | GAACUUUUUCCGUUAUCACTT | 1151 | GUGAUAACGGAAAAAGUUCTT | 1152 | AD-15209 |
| 3358-3376 | AACUUUUUCCGUUAUCACCTT | 1153 | GGUGAUAACGGAAAAAGUUTT | 1154 | AD-15193 |
| 3370-3388 | UAUCACCCAGGCCUGAUUCTT | 1155 | GAAUCAGGCCUGGGUGAUATT | 1156 | AD-15380 |
| 3378-3396 | AGGCCUGAUUCACUGGCCUTT | 1157 | AGGCCAGUGAAUCAGGCCUTT | 1158 | AD-15298 |
| 3383-3401 | UGAUUCACUGGCCUGGCGGTT | 1159 | CCGCCAGGCCAGUGAAUCATT | 1160 | AD-15299 |
| 3385-3403 | AUUCACUGGCCUGGCGGAGTT | 1161 | CUCCGCCAGGCCAGUGAAUTT | 1162 | AD-15265 |
| 3406-3424 | GCUUCUAAGGCAUGGUCGGTT | 1163 | CCGACCAUGCCUUAGAAGCTT | 1164 | AD-15381 |
| 3407-3425 | CUUCUAAGGCAUGGUCGGGTT | 1165 | CCCGACCAUGCCUUAGAAGTT | 1166 | AD-15210 |
| 3429-3447 | GAGGGCCAACAACUGUCCCTT | 1167 | GGGACAGUUGUUGGCCCUCTT | 1168 | AD-15270 |
| 3440-3458 | ACUGUCCCUCCUUGAGCACTsT | 1169 | GUGCUCAAGGAGGGACAGUTsT | 1170 | AD-9591 |
| 3440-3458 | AcuGucccuccuuGAGcAcTsT | 1171 | GUGCUcAAGGAGGGAcAGUTsT | 1172 | AD-9717 |
| 3441-3459 | CUGUCCCUCCUUGAGCACCTsT | 1173 | GGUGCUCAAGGAGGGACAGTsT | 1174 | AD-9622 |
| 3441-3459 | cuGucccuccuuGAGcAccTsT | 1175 | GGUGCUcAAGGAGGGAcAGTsT | 1176 | AD-9748 |
| 3480-3498 | ACAUUUAUCUUUUGGGUCUTsT | 1177 | AGACCCAAAAGAUAAAUGUTsT | 1178 | AD-9587 |
| 3480-3498 | AcAuuuAucuuuuGGGucuTsT | 1179 | AGACCcAAAAGAuAAAUGUTsT | 1180 | AD-9713 |
| 3480-3498 | AfcAfuUfuAfuCfuUfuUfgGfgUfcUfTsT | 1181 | p-aGfaCfcCfaAfaAfgAfuAfaAfuGfuTsT | 1182 | AD-14679 |
| 3480-3498 | ACfAUfUfUfAUfCfUfUfUfUfGGGUfCfUfTsT | 1183 | AGACfCfCfAAAAGAUfAAAUfGUfTsT | 1184 | AD-14689 |
| 3480-3498 | AcAuUuAuCuUuUgGgUcUTsT | 1185 | p-aGfaCfcCfaAfaAfgAfuAfaAfuGfuTsT | 1186 | AD-14699 |
| 3480-3498 | AcAuUuAuCuUuUgGgUcUTsT | 1187 | AGACfCfCfAAAAGAUfAAAUfGUfTsT | 1188 | AD-14709 |
| 3480-3498 | AfcAfuUfuAfuCfuUfuUfgGfgUfcUfTsT | 1189 | AGACCcaAAagAUAAAuguTsT | 1190 | AD-14719 |
| 3480-3498 | ACfAUfUfUfAUfCfUfUfUfUfGGGUfCfUfTsT | 1191 | AGACCcaAAagAUAAAuguTsT | 1192 | AD-14729 |
| 3480-3498 | AcAuUuAuCuUuUgGgUcUTsT | 1193 | AGACCcaAAagAUAAAuguTsT | 1194 | AD-14739 |
| 3480-3498 | GfcCfaUfcUfgCfuGfcCfgGfaGfcCfTsT | 1195 | p-gGfcUfcCfgGfcAfgCfaGfaUfgGfcTsT | 1196 | AD-15085 |
| 3480-3498 | GCfCfAUfCfUfGCfUfGCfCfGGAGCfCfTsT | 1197 | GGCfUfCfCfGGCfAGCfAGAUfGGCfTsT | 1198 | AD-15095 |
| 3480-3498 | GcCaUcUgCuGcCgGaGcCTsT | 1199 | p-gGfcUfcCfgGfcAfgCfaGfaUfgGfcTsT | 1200 | AD-15105 |
| 3480-3498 | GcCaUcUgCuGcCgGaGcCTsT | 1201 | GGCfUfCfCfGGCfAGCfAGAUfGGCfTsT | 1202 | AD-15115 |
| 3480-3498 | GfcCfaUfcUfgCfuGfcCfgGfaGfcCfTsT | 1203 | GGCUCauGCagCAGAUggcTsT | 1204 | AD-15125 |
| 3480-3498 | GCfCfAUfCfUfGCfUfGCfCfGGAGCfCfTsT | 1205 | GGCUCauGCagCAGAUggcTsT | 1206 | AD-15135 |
| 3480-3498 | GcCaUcUgCuGcCgGaGcCTsT | 1207 | GGCUCauGCagCAGAUggcTsT | 1208 | AD-15145 |
| 3481-3499 | CAUUUAUCUUUUGGGUCUGTsT | 1209 | CAGACCCAAAAGAUAAAUGTsT | 1210 | AD-9578 |
| 3481-3499 | cAuuuAucuuuuGGGucuGTsT | 1211 | cAGACCcAAAAGAuAAAUGTsT | 1212 | AD-9704 |
| 3485-3503 | UAUCUUUUGGGUCUGUCCUTsT | 1213 | AGGACAGACCCAAAAGAUATsT | 1214 | AD-9558 |
| 3485-3503 | uAucuuuuGGGucuGuccuTsT | 1215 | AGGAcAGACCcAAAAGAuATsT | 1216 | AD-9684 |
| 3504-3522 | CUCUGUUGCCUUUUUACAGTsT | 1217 | CUGUAAAAAGGCAACAGAGTsT | 1218 | AD-9634 |
| 3504-3522 | cucuGuuGccuuuuuAcAGTsT | 1219 | CUGuAAAAAGGcAAcAGAGTsT | 1220 | AD-9760 |
| 3512-3530 | CCUUUUUACAGCCAACUUUTT | 1221 | AAAGUUGGCUGUAAAAAGGTT | 1222 | AD-15411 |
| 3521-3539 | AGCCAACUUUUCUAGACCUTT | 1223 | AGGUCUAGAAAAGUUGGCUTT | 1224 | AD-15266 |
| 3526-3544 | ACUUUUCUAGACCUGUUUUTT | 1225 | AAAACAGGUCUAGAAAAGUTT | 1226 | AD-15382 |
| 3530-3548 | UUCUAGACCUGUUUUGCUUTsT | 1227 | AAGCAAAACAGGUCUAGAATsT | 1228 | AD-9554 |
| 3530-3548 | uucuAGAccuGuuuuGcuuTsT | 1229 | AAGcAAAAcAGGUCuAGAATsT | 1230 | AD-9680 |
| 3530-3548 | UfuCfuAfgAfcCfuGfuUfuUfgCfuUfTsT | 1231 | p-aAfgCfaAfaAfcAfgGfuCfuAfgAfaTsT | 1232 | AD-14676 |
| 3530-3548 | UfUfCfUfAGACfCfUfGUfUfUfUfGCfUfUfTsT | 1233 | AAGCfAAAACfAGGUfCfUfAGAATsT | 1234 | AD-14686 |
| 3530-3548 | UuCuAgAcCuGuUuUgCuUTsT | 1235 | p-aAfgCfaAfaAfcAfgGfuCfuAfgAfaTsT | 1236 | AD-14696 |
| 3530-3548 | UuCuAgAcCuGuUuUgCuUTsT | 1237 | AAGCfAAAACfAGGUfCfUfAGAATsT | 1238 | AD-14706 |
| 3530-3548 | UfuCfuAfgAfcCfuGfuUfuUffCfuUfTsT | 1239 | AAGcAaaACagGUCUAgaaTsT | 1240 | AD-14716 |
| 3530-3548 | UfUfCfUfAGACfCfUfGUfUfUfUfGCfUfUfTsT | 1241 | AAGcAaaACagGUCUAgaaTsT | 1242 | AD-14726 |
| 3530-3548 | UuCuAgAcCuGuUuUgCuUTsT | 1243 | AAGcAaaACagGUCUAgaaTsT | 1244 | AD-14736 |
| 3530-3548 | CfaUfaGfgCfcUfgGfaGfuUfuAfuUfTsT | 1245 | p-aAthAfaAfcUfcCfaGfgCfcUfaUfgTsT | 1246 | AD-15082 |
| 3530-3548 | CfAUfAGGCfCfUfGGAGUfUfUfAUfUfTsT | 1247 | AAUfAAACfUfCfCfAGGCfCfUfAUfGTsT | 1248 | AD-15092 |
| 3530-3548 | CaUaGgCcUgGaGuUuAuUTsT | 1249 | p-aAthAfaAfcUfcCfaGfgCfcUfaUfgTsT | 1250 | AD-15102 |
| 3530-3548 | CaUaGgCcUgGaGuUuAuUTsT | 1251 | AAUfAAACfUfCfCfAGGCfCfUfAUfGTsT | 1252 | AD-15112 |
| 3530-3548 | CfaUfaGfgCfcUfgGfaGfuUfuAfuUfTsT | 1253 | AAUAAacUCcaGGCCUaugTsT | 1254 | AD-15122 |
| 3530-3548 | CfAUfAGGCfCfUfGGAGUfUfUfAUfUfTsT | 1255 | AAUAAacUCcaGGCCUaugTsT | 1256 | AD-15132 |
| 3530-3548 | CaUaGgCcUgGaGuUuAuUTsT | 1257 | AAUAAacUCcaGGCCUaugTsT | 1258 | AD-15142 |
| 3531-3549 | UCUAGACCUGUUUUGCUUUTsT | 1259 | AAAGCAAAACAGGUCUAGATsT | 1260 | AD-9553 |
| 3531-3549 | ucuAGAccuGuuuuGcuuuTsT | 1261 | AAAGcAAAAcAGGUCuAGATsT | 1262 | AD-9679 |
| 3531-3549 | UfcUfaGfaCfcUfgUfuUfuGfcUfuUfTsT | 1263 | p-aAfaGfcAfaAfaCfaGfgUfcUfaGfaTsT | 1264 | AD-14675 |
| 3531-3549 | UfCfUfAGACfCfUfGUfUfUfUfGCfUfUfUfTsT | 1265 | AAAGCfAAAACfAGGUfCfUfAGATsT | 1266 | AD-14685 |
| 3531-3549 | UcUaGaCcUgUuUuGcUuUTsT | 1267 | p-aAfaGfcAfaAfaCfaGfgUfcUfaGfaTsT | 1268 | AD-14695 |
| 3531-3549 | UcUaGaCcUgUuUuGcUuUTsT | 1269 | AAAGCfAAAACfAGGUfCfUfAGATsT | 1270 | AD-14705 |
| 3531-3549 | UfcUfaGfaCfcUfgUfuUfuGfcUfuUfTsT | 1271 | AAAGCaaAAcaGGUCUagaTsT | 1272 | AD-14715 |
| 3531-3549 | UfCfUfAGACfCfUfGUfUfUfUfGCfUfUfUfTsT | 1273 | AAAGCaaAAcaGGUCUagaTsT | 1274 | AD-14725 |
| 3531-3549 | UcUaGaCcUgUuUuGcUuUTsT | 1275 | AAAGCaaAAcaGGUCUagaTsT | 1276 | AD-14735 |
| 3531-3549 | UfcAfuAfgGfcCfuGfgAfgUfuUfaUfTsT | 1277 | p-aUfaAfaCfuCfcAfgGfcCfuAfuGfaTsT | 1278 | AD-15081 |
| 3531-3549 | UfCfAUfAGGCfCfUfGGAGUfUfUfAUfTsT | 1279 | AUfAAACfUfCfCfAGGCfCfUfAUfGATsT | 1280 | AD-15091 |
| 3531-3549 | UcAuAgGcCuGgAgUuUaUTsT | 1281 | p-aUfaAfaCfuCfcAfgGfcCfuAfuGfaTsT | 1282 | AD-15101 |
| 3531-3549 | UcAuAgGcCuGgAgUuUaUTsT | 1283 | AUfAAACfUfCfCfAGGCfCfUfAUfGATsT | 1284 | AD-15111 |
| 3531-3549 | UfcAfuAfgGfcCfuGfgAfgUfuUfaUfTsT | 1285 | AUAAAcuCCagGCCUAugaTsT | 1286 | AD-15121 |
| 3531-3549 | UfCfAUfAGGCfCfUfGGAGUfUfUfAUfTsT | 1287 | AUAAAcuCCagGCCUAugaTsT | 1288 | AD-15131 |
| 3531-3549 | UcAuAgGcCuGgAgUuUaUTsT | 1289 | AUAAAcuCCagGCCUAugaTsT | 1290 | AD-15141 |
| 3557-3575 | UGAAGAUAUUUAUUCUGGGTsT | 1291 | CCCAGAAUAAAUAUCUUCATsT | 1292 | AD-9626 |
| 3557-3575 | uGAAGAuAuuuAuucuGGGTsT | 1293 | CCcAGAAuAAAuAUCUUcATsT | 1294 | AD-9752 |
| 3570-3588 | UCUGGGUUUUGUAGCAUUUTsT | 1295 | AAAUGCUACAAAACCCAGATsT | 1296 | AD-9629 |
| 3570-3588 | ucuGGGuuuuGuAGcAuuuTsT | 1297 | AAAUGCuAcAAAACCcAGATsT | 1298 | AD-9755 |
| 3613-3631 | AUAAAAACAAACAAACGUUTT | 1299 | AACGUUUGUUUGUUUUUAUTT | 1300 | AD-15412 |
| 3617-3635 | AAACAAACAAACGUUGUCCTT | 1301 | GGACAACGUUUGUUUGUUUTT | 1302 | AD-15211 |
| 3618-3636 | AACAAACAAACGUUGUCCUTT | 1303 | AGGACAACGUUUGUUUGUUTT | 1304 | AD-15300 |

¹U, C, A, G: corresponding ribonucleotide; T: deoxythymidine; u, c, a, g: corresponding 2′-O-methyl ribonucleotide; Uf, Cf, Af, Gf: corresponding 2′-deoxy-2′-fluoro ribonucleotide; where nucleotides are written in sequence, they are connected by 3′-5′ phosphodiester groups; nucleotides with interjected “s” are connected by 3′-O-5′-O phosphorothiodiester groups; unless denoted by prefix “p-”, oligonucleotides are devoid of a 5′-phosphate group on the 5′-most nucleotide; all oligonucleotides bear 3′-OH on the 3′-most nucleotide

TABLE 1
data

| | | | | | | IC50 in |
|---|---|---|---|---|---|---|
| | Mean percent remaining mRNA transcript | | | | | Cynomolgous |
| | at siRNA concentration/in cell type | | | | IC50 in | monkey |
| | 100 nM/ | 30 nM/ | 3 nM/ | 30 nM/ | HepG2 | Hepatocyte |
| Duplex name | HepG2 | HepG2 | HepG2 | Hela | [nM] | [nM]s |
| AD-15220 | | | | 35 | | |
| AD-15275 | | | | 56 | | |
| AD-15301 | | | | 70 | | |
| AD-15276 | | | | 42 | | |
| AD-15302 | | | | 32 | | |
| AD-15303 | | | | 37 | | |
| AD-15221 | | | | 30 | | |
| AD-15413 | | | | 61 | | |
| AD-15304 | | | | 70 | | |
| AD-15305 | | | | 36 | | |
| AD-15306 | | | | 20 | | |
| AD-15307 | | | | 38 | | |
| AD-15277 | | | | 50 | | |
| AD-9526 | 74 | 89 | | | | |
| AD-9652 | | 97 | | | | |
| AD-9519 | | 78 | | | | |
| AD-9645 | | 66 | | | | |
| AD-9523 | | 55 | | | | |
| AD-9649 | | 60 | | | | |
| AD-9569 | | 112 | | | | |
| AD-9695 | | 102 | | | | |
| AD-15222 | | | | 75 | | |
| AD-15278 | | | | 78 | | |
| AD-15178 | | | | 83 | | |
| AD-15308 | | | | 84 | | |
| AD-15223 | | | | 67 | | |
| AD-15309 | | | | 34 | | |
| AD-15279 | | | | 44 | | |
| AD-15194 | | | | 63 | | |
| AD-15310 | | | | 42 | | |
| AD-15311 | | | | 30 | | |
| AD-15392 | | | | 18 | | |
| AD-15312 | | | | 21 | | |
| AD-15313 | | | | 19 | | |
| AD-15280 | | | | 81 | | |
| AD-15267 | | | | 82 | | |
| AD-15314 | | | | 32 | | |
| AD-15315 | | | | 74 | | |
| AD-9624 | | 94 | | | | |
| AD-9750 | | 96 | | | | |
| AD-9623 | 43 | 66 | | | | |
| AD-9749 | | 105 | | | | |
| AD-15384 | | | | 48 | | |
| AD-9607 | | 32 | 28 | | 0.20 | |
| AD-9733 | | 78 | 73 | | | |
| AD-9524 | | 23 | 28 | | 0.07 | |
| AD-9650 | | 91 | 90 | | | |
| AD-9520 | | 23 | 32 | | | |
| AD-9520 | | 23 | | | | |
| AD-9646 | | 97 | 108 | | | |
| AD-9608 | | 37 | | | | |
| AD-9734 | | 91 | | | | |
| AD-9546 | | 32 | | | | |
| AD-9672 | | 57 | | | | |
| AD-15385 | | | | 54 | | |
| AD-15393 | | | | 31 | | |
| AD-15316 | | | | 37 | | |
| AD-15317 | | | | 37 | | |
| AD-15318 | | | | 63 | | |
| AD-15195 | | | | 45 | | |
| AD-15224 | | | | 57 | | |
| AD-15188 | | | | 42 | | |
| AD-15225 | | | | 51 | | |
| AD-15281 | | | | 89 | | |
| AD-15282 | | | | 75 | | |
| AD-15319 | | | | 61 | | |
| AD-15226 | | | | 56 | | |
| AD-15271 | | | | 25 | | |
| AD-15283 | | | | 25 | | |
| AD-15284 | | | | 64 | | |
| AD-15189 | | | | 17 | | |
| AD-15227 | | | | 62 | | |
| AD-9547 | | 31 | 29 | | 0.20 | |
| AD-9673 | | 56 | 57 | | | |
| AD-9548 | | 54 | 60 | | | |
| AD-9674 | | 36 | 57 | | | |
| AD-9529 | | 60 | | | | |
| AD-9655 | | 140 | | | | |
| AD-9605 | | 27 | 31 | | 0.27 | |
| AD-9731 | | 31 | 31 | | 0.32 | |
| AD-9596 | | 37 | | | | |
| AD-9722 | | 76 | | | | |
| AD-9583 | | 42 | | | | |
| AD-9709 | | 104 | | | | |
| AD-9579 | | 113 | | | | |
| AD-9705 | | 81 | | | | |
| AD-15394 | | | | 32 | | |
| AD-15196 | | | | 72 | | |
| AD-15197 | | | | 85 | | |
| AD-15198 | | | | 71 | | |
| AD-9609 | 66 | 71 | | | | |
| AD-9735 | | 115 | | | | |
| AD-9537 | | 145 | | | | |
| AD-9663 | | 102 | | | | |
| AD-9528 | | 113 | | | | |
| AD-9654 | | 107 | | | | |
| AD-9515 | | 49 | | | | |
| AD-9641 | | 92 | | | | |
| AD-9514 | | 57 | | | | |
| AD-9640 | | 89 | | | | |
| AD-9530 | | 75 | | | | |
| AD-9656 | | 77 | | | | |
| AD-9538 | 79 | 80 | | | | |
| AD-9664 | | 53 | | | | |
| AD-9598 | 69 | 83 | | | | |
| AD-9724 | | 127 | | | | |
| AD-9625 | 58 | 88 | | | | |
| AD-9751 | | 60 | | | | |
| AD-9556 | | 46 | | | | |
| AD-9682 | | 38 | | | | |
| AD-9539 | 56 | 63 | | | | |
| AD-9665 | | 83 | | | | |
| AD-9517 | | 36 | | | | |
| AD-9643 | | 40 | | | | |
| AD-9610 | | 36 | 34 | | 0.04 | |
| AD-9736 | | 22 | 29 | | 0.04 | |
| AD-14681 | | | | 33 | | |
| AD-14691 | | | | 27 | | |
| AD-14701 | | | | 32 | | |
| AD-14711 | | | | 33 | | |
| AD-14721 | | | | 22 | | |
| AD-14731 | | | | 21 | | |
| AD-14741 | | | | 22 | | |
| AD-15087 | | | | 37 | | |
| AD-15097 | | | | 51 | | |
| AD-15107 | | | | 26 | | |
| AD-15117 | | | | 28 | | |
| AD-15127 | | | | 33 | | |
| AD-15137 | | | | 54 | | |
| AD-15147 | | | | 52 | | |
| AD-9516 | | 94 | | | | |
| AD-9642 | | 105 | | | | |
| AD-9562 | | 46 | 51 | | | |
| AD-9688 | | 26 | 34 | | 4.20 | |
| AD-14677 | | | | 38 | | |
| AD-14687 | | | | 52 | | |
| AD-14697 | | | | 35 | | |
| AD-14707 | | | | 58 | | |
| AD-14717 | | | | 42 | | |
| AD-14727 | | | | 50 | | |
| AD-14737 | | | | 32 | | |
| AD-15083 | | | | 16 | | |
| AD-15093 | | | | 24 | | |
| AD-15103 | | | | 11 | | |
| AD-15113 | | | | 34 | | |
| AD-15123 | | | | 19 | | |
| AD-15133 | | | | 15 | | |
| AD-15143 | | | | 16 | | |
| AD-9521 | | 50 | | | | |
| AD-9647 | | 62 | | | | |
| AD-9611 | | 48 | | | | |
| AD-9737 | | 68 | | | | |
| AD-9592 | 46 | 55 | | | | |
| AD-9718 | | 78 | | | | |
| AD-9561 | | 64 | | | | |
| AD-9687 | | 84 | | | | |
| AD-9636 | | 42 | 41 | | 2.10 | |
| AD-9762 | | 9 | 28 | | 0.40 | |
| AD-9540 | | 45 | | | | |
| AD-9666 | | 81 | | | | |
| AD-9535 | 48 | 73 | | | | |
| AD-9661 | | 83 | | | | |
| AD-9559 | | 35 | | | | |
| AD-9685 | | 77 | | | | |
| AD-9533 | | 100 | | | | |
| AD-9659 | | 88 | | | | |
| AD-9612 | | 122 | | | | |
| AD-9738 | | 83 | | | | |
| AD-9557 | 75 | 96 | | | | |
| AD-9683 | | 48 | | | | |
| AD-9531 | | 31 | 32 | | 0.53 | |
| AD-9657 | | 23 | 29 | | 0.66 | |
| AD-14673 | | | | 81 | | |
| AD-14683 | | | | 56 | | |
| AD-14693 | | | | 56 | | |
| AD-14703 | | | | 68 | | |
| AD-14713 | | | | 55 | | |
| AD-14723 | | | | 24 | | |
| AD-14733 | | | | 34 | | |
| AD-15079 | | | | 85 | | |
| AD-15089 | | | | 54 | | |
| AD-15099 | | | | 70 | | |
| AD-15109 | | | | 67 | | |
| AD-15119 | | | | 67 | | |
| AD-15129 | | | | 57 | | |
| AD-15139 | | | | 69 | | |
| AD-9542 | | 160 | | | | |
| AD-9668 | | 92 | | | | |
| AD-9739 | | 109 | | | | |
| AD-9637 | 56 | 83 | | | | |
| AD-9763 | | 79 | | | | |
| AD-9630 | | 82 | | | | |
| AD-9756 | | 63 | | | | |
| AD-9593 | | 55 | | | | |
| AD-9719 | | 115 | | | | |
| AD-9601 | | 111 | | | | |
| AD-9727 | | 118 | | | | |
| AD-9573 | | 36 | 42 | | 1.60 | |
| AD-9699 | | 32 | 36 | | 2.50 | |
| AD-15228 | | | | 26 | | |
| AD-15395 | | | | 53 | | |
| AD-9602 | | 126 | | | | |
| AD-9728 | | 94 | | | | |
| AD-15386 | | | | 45 | | |
| AD-9580 | | 112 | | | | |
| AD-9706 | | 86 | | | | |
| AD-9581 | | 35 | | | | |
| AD-9707 | | 81 | | | | |
| AD-9543 | | 51 | | | | |
| AD-9669 | | 97 | | | | |
| AD-9574 | | 74 | | | | |
| AD-9700 | | | | | | |
| AD-15320 | | | | 26 | | |
| AD-15321 | | | | 34 | | |
| AD-15199 | | | | 64 | | |
| AD-15167 | | | | 86 | | |
| AD-15164 | | | | 41 | | |
| AD-15166 | | | | 43 | | |
| AD-15322 | | | | 64 | | |
| AD-15200 | | | | 46 | | |
| AD-15213 | | | | 27 | | |
| AD-15229 | | | | 44 | | |
| AD-15215 | | | | 49 | | |
| AD-15214 | | | | 101 | | |
| AD-9315 | | 15 | 32 | | 0.98 | |
| AD-9326 | | 35 | 51 | | | |
| AD-9318 | | 14 | 37 | | 0.40 | |
| AD-9323 | | 14 | 33 | | | |
| AD-9314 | | 11 | 22 | | 0.04 | |
| AD-10792 | | | | | 0.10 | 0.10 |
| AD-10796 | | | | | 0.1 | 0.1 |
| AD-9638 | | 101 | | | | |
| AD-9764 | | 112 | | | | |
| AD-9525 | | 53 | | | | |
| AD-9651 | | 58 | | | | |
| AD-9560 | | 97 | | | | |
| AD-9686 | | 111 | | | | |
| AD-9536 | | 157 | | | | |
| AD-9662 | | 81 | | | | |
| AD-9584 | 52 | 68 | | | | |
| AD-9710 | | 111 | | | | |
| AD-15323 | | | | 62 | | |
| AD-9551 | | 91 | | | | |
| AD-9677 | | 62 | | | | |
| AD-15230 | | | | 52 | | |
| AD-15231 | | | | 25 | | |
| AD-15285 | | | | 36 | | |
| AD-15396 | | | | 27 | | |
| AD-15397 | | | | 56 | | |
| AD-9600 | | 112 | | | | |
| AD-9726 | | 95 | | | | |
| AD-9606 | | 107 | | | | |
| AD-9732 | | 105 | | | | |
| AD-9633 | 56 | 75 | | | | |
| AD-9759 | | 111 | | | | |
| AD-9588 | | 66 | | | | |
| AD-9714 | | 106 | | | | |
| AD-9589 | 67 | 85 | | | | |
| AD-9715 | | 113 | | | | |
| AD-9575 | | 120 | | | | |
| AD-9701 | | 100 | | | | |
| AD-9563 | | 103 | | | | |
| AD-9689 | | 81 | | | | |
| AD-9594 | 80 | 95 | | | | |
| AD-9720 | | 92 | | | | |
| AD-9585 | | 83 | | | | |
| AD-9711 | | 122 | | | | |
| AD-9614 | | 100 | | | | |
| AD-9740 | | 198 | | | | |
| AD-9615 | | 116 | | | | |
| AD-9741 | | 130 | | | | |
| AD-9534 | | 32 | 30 | | | |
| AD-9534 | | 32 | | | | |
| AD-9660 | | 89 | 79 | | | |
| AD-15324 | | | | 46 | | |
| AD-15232 | | | | 19 | | |
| AD-15233 | | | | 25 | | |
| AD-15234 | | | | 59 | | |
| AD-15286 | | | | 109 | | |
| AD-9590 | | 122 | | | | |
| AD-9716 | | 114 | | | | |
| AD-9632 | | 34 | | | | |
| AD-9758 | | 96 | | | | |
| AD-9567 | | 41 | | | | |
| AD-9693 | | 50 | | | | |
| AD-9586 | 81 | 104 | | | | |
| AD-9712 | | 107 | | | | |
| AD-9564 | | 120 | | | | |
| AD-9690 | | 92 | | | | |
| AD-9616 | 74 | 84 | | | | |
| AD-9742 | | 127 | | | | |
| AD-15398 | | | | 24 | | |
| AD-9617 | | 111 | | | | |
| AD-9743 | | 104 | | | | |
| AD-9635 | 73 | 90 | | | | |
| AD-9761 | | 83 | | | | |
| AD-9568 | | 76 | | | | |
| AD-9694 | | 52 | | | | |
| AD-9576 | | 47 | | | | |
| AD-9702 | | 79 | | | | |
| AD-9627 | | 69 | | | | |
| AD-9753 | | 127 | | | | |
| AD-9628 | | 141 | | | | |
| AD-9754 | | 89 | | | | |
| AD-9631 | | 80 | | | | |
| AD-9757 | | 78 | | | | |
| AD-9595 | | 31 | 32 | | | |
| AD-9721 | | 87 | 70 | | | |
| AD-9544 | | 68 | | | | |
| AD-9670 | | 67 | | | | |
| AD-15235 | | | | 25 | | |
| AD-15236 | | | | 73 | | |
| AD-15168 | | | | 100 | | |
| AD-15174 | | | | 92 | | |
| AD-15325 | | | | 81 | | |
| AD-15326 | | | | 65 | | |
| AD-9570 | 35 | 42 | | | | |
| AD-9696 | | 77 | | | | |
| AD-9566 | | 38 | | | | |
| AD-9692 | | 78 | | | | |
| AD-9532 | | 100 | | | | |
| AD-9658 | | 102 | | | | |
| AD-9549 | | 50 | | | | |
| AD-9675 | | 78 | | | | |
| AD-9541 | | 43 | | | | |
| AD-9667 | | 73 | | | | |
| AD-9550 | | 36 | | | | |
| AD-9676 | | 100 | | | | |
| AD-9571 | | 27 | 32 | | | |
| AD-9697 | | 74 | 89 | | | |
| AD-9572 | 47 | 53 | | | | |
| AD-9698 | | 73 | | | | |
| AD-15327 | | | | 82 | | |
| AD-9639 | | 30 | 35 | | | |
| AD-9765 | | 82 | 74 | | | |
| AD-9518 | | 31 | 35 | | 0.60 | |
| AD-9518 | | 31 | | | | |
| AD-9644 | | 35 | 37 | | 2.60 | |
| AD-14672 | | | | 26 | | |
| AD-14682 | | | | 27 | | |
| AD-14692 | | | | 22 | | |
| AD-14702 | | | | 19 | | |
| AD-14712 | | | | 25 | | |
| AD-14722 | | | | 18 | | |
| AD-14732 | | | | 32 | | |
| AD-15078 | | | | 86 | | |
| AD-15088 | | | | 97 | | |
| AD-15098 | | | | 74 | | |
| AD-15108 | | | | 67 | | |
| AD-15118 | | | | 76 | | |
| AD-15128 | | | | 86 | | |
| AD-15138 | | | | 74 | | |
| AD-15237 | | | | 30 | | |
| AD-15287 | | | | 30 | | |
| AD-15238 | | | | 36 | | |
| AD-15328 | | | | 35 | | |
| AD-15399 | | | | 47 | | |
| AD-9582 | | 37 | | | | |
| AD-9708 | | 81 | | | | |
| AD-9545 | | 31 | 43 | | | |
| AD-9671 | | 15 | 33 | | 2.50 | |
| AD-14674 | | | | 16 | | |
| AD-14684 | | | | 26 | | |
| AD-14694 | | | | 18 | | |
| AD-14704 | | | | 27 | | |
| AD-14714 | | | | 20 | | |
| AD-14724 | | | | 18 | | |
| AD-14734 | | | | 18 | | |
| AD-15080 | | | | 29 | | |
| AD-15090 | | | | 23 | | |
| AD-15100 | | | | 26 | | |
| AD-15110 | | | | 23 | | |
| AD-15120 | | | | 20 | | |
| AD-15130 | | | | 20 | | |
| AD-15140 | | | | 19 | | |
| AD-9522 | | 59 | | | | |
| AD-9648 | | 78 | | | | |
| AD-9552 | | 80 | | | | |
| AD-9678 | | 76 | | | | |
| AD-9618 | | 90 | | | | |
| AD-9744 | | 91 | | | | |
| AD-15239 | | | | 38 | | |
| AD-15212 | | | | 19 | | |
| AD-15240 | | | | 43 | | |
| AD-15177 | | | | 59 | | |
| AD-15179 | | | | 13 | | |
| AD-15180 | | | | 15 | | |
| AD-15241 | | | | 14 | | |
| AD-15268 | | | | 42 | | |
| AD-15242 | | | | 21 | | |
| AD-15216 | | | | 28 | | |
| AD-15176 | | | | 35 | | |
| AD-15181 | | | | 35 | | |
| AD-15243 | | | | 22 | | |
| AD-15182 | | | | 42 | | |
| AD-15244 | | | | 31 | | |
| AD-15387 | | | | 23 | | |
| AD-15245 | | | | 18 | | |
| AD-9555 | | 34 | | | | |
| AD-9681 | | 55 | | | | |
| AD-9619 | 42 | 61 | | | | |
| AD-9745 | | 56 | | | | |
| AD-9620 | 44 | 77 | | | | |
| AD-9746 | | 89 | | | | |
| AD-15288 | | | | 19 | | |
| AD-15246 | | | | 16 | | |
| AD-15289 | | | | 37 | | |
| AD-9324 | | 59 | 67 | | | |
| AD-15329 | | | | 103 | | |
| AD-15330 | | | | 62 | | |
| AD-15169 | | | | 22 | | |
| AD-15201 | | | | 6 | | |
| AD-15331 | | | | 14 | | |
| AD-15190 | | | | 47 | | |
| AD-15247 | | | | 61 | | |
| AD-15248 | | | | 22 | | |
| AD-15175 | | | | 45 | | |
| AD-15249 | | | | 51 | | |
| AD-15250 | | | | 96 | | |
| AD-15400 | | | | 12 | | |
| AD-15332 | | | | 22 | | |
| AD-15388 | | | | 30 | | |
| AD-15333 | | | | 20 | | |
| AD-15334 | | | | 96 | | |
| AD-15335 | | | | 75 | | |
| AD-15183 | | | | 16 | | |
| AD-15202 | | | | 41 | | |
| AD-15203 | | | | 39 | | |
| AD-15272 | | | | 49 | | |
| AD-15217 | | | | 16 | | |
| AD-15290 | | | | 15 | | |
| AD-15218 | | | | 13 | | |
| AD-15389 | | | | 13 | | |
| AD-15336 | | | | 40 | | |
| AD-15337 | | | | 19 | | |
| AD-15191 | | | | 33 | | |
| AD-15390 | | | | 25 | | |
| AD-15338 | | | | 9 | | |
| AD-15204 | | | | 33 | | |
| AD-15251 | | | | 76 | | |
| AD-15205 | | | | 14 | | |
| AD-15171 | | | | 16 | | |
| AD-15252 | | | | 58 | | |
| AD-15339 | | | | 20 | | |
| AD-15253 | | | | 15 | | |
| AD-15340 | | | | 18 | | |
| AD-15291 | | | | 17 | | |
| AD-15341 | | | | 11 | | |
| AD-15401 | | | | 13 | | |
| AD-15342 | | | | 30 | | |
| AD-15343 | | | | 21 | | |
| AD-15292 | | | | 16 | | |
| AD-15344 | | | | 20 | | |
| AD-15254 | | | | 18 | | |
| AD-15345 | | | | 18 | | |
| AD-15206 | | | | 15 | | |
| AD-15346 | | | | 16 | | |
| AD-15347 | | | | 62 | | |
| AD-9577 | | 33 | 31 | | | |
| AD-9703 | | 17 | 26 | | | |
| AD-14678 | | | | 22 | | |
| AD-14688 | | | | 23 | | |
| AD-14698 | | | | 23 | | |
| AD-14708 | | | | 14 | | |
| AD-14718 | | | | 31 | | |
| AD-14728 | | | | 25 | | |
| AD-14738 | | | | 31 | | |
| AD-15084 | | | | 19 | | |
| AD-15094 | | | | 11 | | |
| AD-15104 | | | | 16 | | |
| AD-15114 | | | | 15 | | |
| AD-15124 | | | | 11 | | |
| AD-15134 | | | | 12 | | |
| AD-15144 | | | | 9 | | |
| AD-15391 | | | | 7 | | |
| AD-15348 | | | | 13 | | |
| AD-15349 | | | | 8 | | |
| AD-15170 | | | | 40 | | |
| AD-15350 | | | | 14 | | |
| AD-15402 | | | | 27 | | |
| AD-15293 | | | | 27 | | |
| AD-15351 | | | | 14 | | |
| AD-15403 | | | | 11 | | |
| AD-15404 | | | | 38 | | |
| AD-15207 | | | | 15 | | |
| AD-15352 | | | | 23 | | |
| AD-15255 | | | | 31 | | |
| AD-9603 | | 123 | | | | |
| AD-9729 | | 56 | | | | |
| AD-9599 | | 139 | | | | |
| AD-9725 | | 38 | | | | |
| AD-9621 | | 77 | | | | |
| AD-9747 | | 63 | | | | |
| AD-15405 | | | | 32 | | |
| AD-15353 | | | | 39 | | |
| AD-15354 | | | | 49 | | |
| AD-15406 | | | | 35 | | |
| AD-15407 | | | | 39 | | |
| AD-15355 | | | | 18 | | |
| AD-15356 | | | | 50 | | |
| AD-15357 | | | | 54 | | |
| AD-15269 | | | | 23 | | |
| AD-9565 | | 74 | | | | |
| AD-9691 | | 49 | | | | |
| AD-15358 | | | | 12 | | |
| AD-15359 | | | | 24 | | |
| AD-15360 | | | | 13 | | |
| AD-15219 | | | | 19 | | |
| AD-15361 | | | | 24 | | |
| AD-15273 | | | | 36 | | |
| AD-15362 | | | | 31 | | |
| AD-15192 | | | | 20 | | |
| AD-15256 | | | | 19 | | |
| AD-15363 | | | | 33 | | |
| AD-15364 | | | | 24 | | |
| AD-9604 | 35 | 49 | | | | |
| AD-9730 | | 85 | | | | |
| AD-9527 | | 45 | | | | |
| AD-9653 | | 86 | | | | |
| AD-15365 | | | | 62 | | |
| AD-15294 | | | | 30 | | |
| AD-15173 | | | | 12 | | |
| AD-15366 | | | | 21 | | |
| AD-15367 | | | | 11 | | |
| AD-15257 | | | | 18 | | |
| AD-15184 | | | | 50 | | |
| AD-15185 | | | | 12 | | |
| AD-15258 | | | | 73 | | |
| AD-15186 | | | | 36 | | |
| AD-15274 | | | | 19 | | |
| AD-15368 | | | | 7 | | |
| AD-15369 | | | | 17 | | |
| AD-15370 | | | | 19 | | |
| AD-15259 | | | | 38 | | |
| AD-15408 | | | | 52 | | |
| AD-9597 | | 23 | 21 | | 0.04 | |
| AD-9723 | | 12 | 26 | | | |
| AD-14680 | | | | 15 | | |
| AD-14690 | | | | 18 | | |
| AD-14700 | | | | 15 | | |
| AD-14710 | | | | 15 | | |
| AD-14720 | | | | 18 | | |
| AD-14730 | | | | 18 | | |
| AD-14740 | | | | 17 | | |
| AD-15086 | | | | 85 | | |
| AD-15096 | | | | 70 | | |
| AD-15106 | | | | 71 | | |
| AD-15116 | | | | 73 | | |
| AD-15126 | | | | 71 | | |
| AD-15136 | | | | 56 | | |
| AD-15146 | | | | 72 | | |
| AD-15260 | | | | 79 | | |
| AD-15371 | | | | 24 | | |
| AD-15372 | | | | 52 | | |
| AD-15172 | | | | 27 | | |
| AD-15295 | | | | 22 | | |
| AD-15373 | | | | 11 | | |
| AD-15163 | | | | 18 | | |
| AD-15165 | | | | 13 | | |
| AD-15374 | | | | 23 | | |
| AD-15296 | | | | 13 | | |
| AD-15261 | | | | 20 | | |
| AD-15375 | | | | 90 | | |
| AD-15262 | | | | 72 | | |
| AD-15376 | | | | 14 | | |
| AD-15377 | | | | 19 | | |
| AD-15409 | | | | 17 | | |
| AD-15378 | | | | 18 | | |
| AD-15410 | | | | 8 | | |
| AD-15379 | | | | 11 | | |
| AD-15187 | | | | 36 | | |
| AD-15263 | | | | 18 | | |
| AD-15264 | | | | 75 | | |
| AD-15297 | | | | 21 | | |
| AD-15208 | | | | 6 | | |
| AD-15209 | | | | 28 | | |
| AD-15193 | | | | 131 | | |
| AD-15380 | | | | 88 | | |
| AD-15298 | | | | 43 | | |
| AD-15299 | | | | 99 | | |
| AD-15265 | | | | 95 | | |
| AD-15381 | | | | 18 | | |
| AD-15210 | | | | 40 | | |
| AD-15270 | | | | 83 | | |
| AD-9591 | 75 | 95 | | | | |
| AD-9717 | | 105 | | | | |
| AD-9622 | | 94 | | | | |
| AD-9748 | | 103 | | | | |
| AD-9587 | | 63 | 49 | | | |
| AD-9713 | | 22 | 25 | | | |
| AD-14679 | | | | 19 | | |
| AD-14689 | | | | 24 | | |
| AD-14699 | | | | 19 | | |
| AD-14709 | | | | 21 | | |
| AD-14719 | | | | 24 | | |
| AD-14729 | | | | 23 | | |
| AD-14739 | | | | 24 | | |
| AD-15085 | | | | 74 | | |
| AD-15095 | | | | 60 | | |
| AD-15105 | | | | 33 | | |
| AD-15115 | | | | 30 | | |
| AD-15125 | | | | 54 | | |
| AD-15135 | | | | 51 | | |
| AD-15145 | | | | 49 | | |
| AD-9578 | 49 | 61 | | | | |
| AD-9704 | | 111 | | | | |
| AD-9558 | | 66 | | | | |
| AD-9684 | | 63 | | | | |
| AD-9634 | | 29 | 30 | | | |
| AD-9760 | | 14 | 27 | | | |
| AD-15411 | | | | 5 | | |
| AD-15266 | | | | 23 | | |
| AD-15382 | | | | 12 | | |
| AD-9554 | | 23 | 24 | | | |
| AD-9680 | | 12 | 22 | | 0.10 | 0.10 |
| AD-14676 | | | | 12 | | |
| AD-14686 | | | | 13 | | |
| AD-14696 | | | | 12 | | |
| AD-14706 | | | | 18 | | |
| AD-14716 | | | | 17 | | |
| AD-14726 | | | | 16 | | |
| AD-14736 | | | | 9 | | |
| AD-15082 | | | | 27 | | |
| AD-15092 | | | | 28 | | |
| AD-15102 | | | | 19 | | |
| AD-15112 | | | | 17 | | |
| AD-15122 | | | | 56 | | |
| AD-15132 | | | | 39 | | |
| AD-15142 | | | | 46 | | |
| AD-9553 | | 27 | 22 | | 0.02 | |
| AD-9679 | | 17 | 21 | | | |
| AD-14675 | | | | 11 | | |
| AD-14685 | | | | 19 | | |
| AD-14695 | | | | 12 | | |
| AD-14705 | | | | 16 | | |
| AD-14715 | | | | 19 | | |
| AD-14725 | | | | 19 | | |
| AD-14735 | | | | 19 | | |
| AD-15081 | | | | 30 | | |
| AD-15091 | | | | 16 | | |
| AD-15101 | | | | 16 | | |
| AD-15111 | | | | 11 | | |
| AD-15121 | | | | 19 | | |
| AD-15131 | | | | 17 | | |
| AD-15141 | | | | 18 | | |
| AD-9626 | | 97 | 68 | | | |
| AD-9752 | | 28 | 33 | | | |
| AD-9629 | | 23 | 24 | | | |
| AD-9755 | | 28 | 29 | | | |
| AD-15412 | | | | 21 | | |
| AD-15211 | | | | 73 | | |
| AD-15300 | | | | 41 | | |

TABLE 2

| | | SEQ | | SEQ |
|---|---|---|---|---|
| Duplex | | ID | | ID |
| number | Sense strand sequence (5′-3′)¹ | NO: | Antisense-strand sequence (5′-3′)¹ | NO: |
| AD-10792 | GccuGGAGuuuAuucGGAATsT | 1305 | UUCCGAAuAAACUCcAGGCTsT | 1306 |
| AD-10793 | GccuGGAGuuuAuucGGAATsT | 1307 | uUcCGAAuAAACUccAGGCTsT | 1308 |
| AD-10796 | GccuGGAGuuuAuucGGAATsT | 1309 | UUCCGAAUAAACUCCAGGCTsT | 1310 |
| AD-12038 | GccuGGAGuuuAuucGGAATsT | 1311 | uUCCGAAUAAACUCCAGGCTsT | 1312 |
| AD-12039 | GccuGGAGuuuAuucGGAATsT | 1313 | UuCCGAAUAAACUCCAGGCTsT | 1314 |
| AD-12040 | GccuGGAGuuuAuucGGAATsT | 1315 | UUcCGAAUAAACUCCAGGCTsT | 1316 |
| AD-12041 | GccuGGAGuuuAuucGGAATsT | 1317 | UUCcGAAUAAACUCCAGGCTsT | 1318 |
| AD-12042 | GCCUGGAGUUUAUUCGGAATsT | 1319 | uUCCGAAUAAACUCCAGGCTsT | 1320 |
| AD-12043 | GCCUGGAGUUUAUUCGGAATsT | 1321 | UuCCGAAUAAACUCCAGGCTsT | 1322 |
| AD-12044 | GCCUGGAGUUUAUUCGGAATsT | 1323 | UUcCGAAUAAACUCCAGGCTsT | 1324 |
| AD-12045 | GCCUGGAGUUUAUUCGGAATsT | 1325 | UUCcGAAUAAACUCCAGGCTsT | 1326 |
| AD-12046 | GccuGGAGuuuAuucGGAA | 1327 | UUCCGAAUAAACUCCAGGCscsu | 1328 |
| AD-12047 | GccuGGAGuuuAuucGGAAA | 1329 | UUUCCGAAUAAACUCCAGGCscsu | 1330 |
| AD-12048 | GccuGGAGuuuAuucGGAAAA | 1331 | UUUUCCGAAUAAACUCCAGGCscsu | 1332 |
| AD-12049 | GccuGGAGuuuAuucGGAAAAG | 1333 | CUUUUCCGAAUAAACUCCAGGCscsu | 1334 |
| AD-12050 | GccuGGAGuuuAuucGGAATTab | 1335 | UUCCGAAUAAACUCCAGGCTTab | 1336 |
| AD-12051 | GccuGGAGuuuAuucGGAAATTab | 1337 | UUUCCGAAuAAACUCCAGGCTTab | 1338 |
| AD-12052 | GccuGGAGuuuAuucGGAAAATTab | 1339 | UUUUCCGAAUAAACUCCAGGCTTab | 1340 |
| AD-12053 | GccuGGAGuuuAuucGGAAAAGTTab | 1341 | CUUUUCCGAAUAAACUCCAGGCTTab | 1342 |
| AD-12054 | GCCUGGAGUUUAUUCGGAATsT | 1343 | UUCCGAAUAAACUCCAGGCscsu | 1344 |
| AD-12055 | GccuGGAGuuuAuucGGAATsT | 1345 | UUCCGAAUAAACUCCAGGCscsu | 1346 |
| AD-12056 | GcCuGgAgUuUaUuCgGaA | 1347 | UUCCGAAUAAACUCCAGGCTTab | 1348 |
| AD-12057 | GcCuGgAgUuUaUuCgGaA | 1349 | UUCCGAAUAAACUCCAGGCTsT | 1350 |
| AD-12058 | GcCuGgAgUuUaUuCgGaA | 1351 | UUCCGAAuAAACUCcAGGCTsT | 1352 |
| AD-12059 | GcCuGgAgUuUaUuCgGaA | 1353 | uUcCGAAuAAACUccAGGCTsT | 1354 |
| AD-12060 | GcCuGgAgUuUaUuCgGaA | 1355 | UUCCGaaUAaaCUCCAggc | 1356 |
| AD-12061 | GcCuGgAgUuUaUuCgGaATsT | 1357 | UUCCGaaUAaaCUCCAggcTsT | 1358 |
| AD-12062 | GcCuGgAgUuUaUuCgGaATTab | 1359 | UUCCGaaUAaaCUCCAggcTTab | 1360 |
| AD-12063 | GcCuGgAgUuUaUuCgGaA | 1361 | UUCCGaaUAaaCUCCAggcscsu | 1362 |
| AD-12064 | GcCuGgAgUuUaUuCgGaATsT | 1363 | UUCCGAAuAAACUCcAGGCTsT | 1364 |
| AD-12065 | GcCuGgAgUuUaUuCgGaATTab | 1365 | UUCCGAAuAAACUCcAGGCTTab | 1366 |
| AD-12066 | GcCuGgAgUuUaUuCgGaA | 1367 | UUCCGAAuAAACUCcAGGCscsu | 1368 |
| AD-12067 | GcCuGgAgUuUaUuCgGaATsT | 1369 | UUCCGAAUAAACUCCAGGCTsT | 1370 |
| AD-12068 | GcCuGgAgUuUaUuCgGaATTab | 1371 | UUCCGAAUAAACUCCAGGCTTab | 1372 |
| AD-12069 | GcCuGgAgUuUaUuCgGaA | 1373 | UUCCGAAUAAACUCCAGGCscsu | 1374 |
| AD-12338 | GfcCfuGfgAfgUfuUfaUfuCfgGfaAf | 1375 | P-uUfcCfgAfaUfaAfaCfuCfcAfgGfc | 1376 |
| AD-12339 | GcCuGgAgUuUaUuCgGaA | 1377 | P-uUfcCfgAfaUfaAfaCfuCfcAfgGfc | 1378 |
| AD-12340 | GccuGGAGuuuAuucGGAA | 1379 | P-uUfcCfgAfaUfaAfaCfuCfcAfgGfc | 1380 |
| AD-12341 | GfcCfuGfgAfgUfuUfaUfuCfgGfaAffsT | 1381 | P-uUfcCfgAfaUfaAfaCfuCfcAfgGfcTsT | 1382 |
| AD-12342 | GfcCfuGfgAfgUfuUfaUfuCfgGfaAffsT | 1383 | UUCCGAAuAAACUCcAGGCTsT | 1384 |
| AD-12343 | GfcCfuGfgAfgUfuUfaUfuCfgGfaAffsT | 1385 | uUcCGAAuAAACUccAGGCTsT | 1386 |
| AD-12344 | GfcCfuGfgAfgUfuUfaUfuCfgGfaAffsT | 1387 | UUCCGAAUAAACUCCAGGCTsT | 1388 |
| AD-12345 | GfcCfuGfgAfgUfuUfaUfuCfgGfaAffsT | 1389 | UUCCGAAUAAACUCCAGGCscsu | 1390 |
| AD-12346 | GfcCfuGfgAfgUfuUfaUfuCfgGfaAffsT | 1391 | UUCCGaaUAaaCUCCAggcscsu | 1392 |
| AD-12347 | GCCUGGAGUUUAUUCGGAATsT | 1393 | P-uUfcCfgAfaUfaAfaCfuCfcAfgGfcTsT | 1394 |
| AD-12348 | GccuGGAGuuuAuucGGAATsT | 1395 | P-uUfcCfgAfaUfaAfaCfuCfcAfgGfcTsT | 1396 |
| AD-12349 | GcCuGgAgUuUaUuCgGaATsT | 1397 | P-uUfcCfgAfaUfaAfaCfuCfcAfgGfcTsT | 1398 |
| AD-12350 | GfcCfuGfgAfgUfuUfaUfuCfgGfaAfTTab | 1399 | P-uUfcCfgAfaUfaAfaCfuCfcAfgGfcTTab | 1400 |
| AD-12351 | GfcCfuGfgAfgUfuUfaUfuCfgGfaAf | 1401 | P-uUfcCfgAfaUfaAfaCfuCfcAfgGfcsCfsu | 1402 |
| AD-12352 | GfcCfuGfgAfgUfuUfaUfuCfgGfaAf | 1403 | UUCCGaaUAaaCUCCAggcscsu | 1404 |
| AD-12354 | GfcCfuGfgAfgUfuUfaUfuCfgGfaAf | 1405 | UUCCGAAUAAACUCCAGGCscsu | 1406 |
| AD-12355 | GfcCfuGfgAfgUfuUfaUfuCfgGfaAf | 1407 | UUCCGAAuAAACUCcAGGCTsT | 1408 |
| AD-12356 | GfcCfuGfgAfgUfuUfaUfuCfgGfaAf | 1409 | uUcCGAAuAAACUccAGGCTsT | 1410 |
| AD-12357 | GmocCmouGmogAm02gUmouUmoaUmouC | 1411 | UUCCGaaUAaaCUCCAggc | 1412 |
| | mogGmoaA | | | |
| AD-12358 | GmocCmouGmogAm02gUmouUmoaUmouC | 1413 | P-uUfcCfgAfaUfaAfaCfuCfcAfgGfc | 1414 |
| | mogGmoaA | | | |
| AD-12359 | GmocCmouGmogAm02gUmouUmoaUmouC | 1415 | P-uUfcCfgAfaUfaAfaCfuCfcAfgGfcsCfsu | 1416 |
| | mogGmoaA | | | |
| AD-12360 | GmocCmouGmogAm02gUmouUmoaUmouC | 1417 | UUCCGAAUAAACUCCAGGCscsu | 1418 |
| | mogGmoaA | | | |
| AD-12361 | GmocCmouGmogAm02gUmouUmoaUmouC | 1419 | UUCCGAAuAAACUCcAGGCTsT | 1420 |
| | mogGmoaA | | | |
| AD-12362 | GmocCmouGmogAm02gUmouUmoaUmouC | 1421 | uUcCGAAuAAACUccAGGCTsT | 1422 |
| | mogGmoaA | | | |
| AD-12363 | GmocCmouGmogAm02gUmouUmoaUmouC | 1423 | UUCCGaaUAaaCUCCAggcscsu | 1424 |
| | mogGmoaA | | | |
| AD-12364 | GmocCmouGmogAmogUmouUmoaUmouCm | 1425 | UUCCGaaUAaaCUCCAggcTsT | 1426 |
| | ogGmoaATsT | | | |
| AD-12365 | GmocCmouGmogAmogUmouUmoaUmouCm | 1427 | UUCCGAAuAAACUCcAGGCTsT | 1428 |
| | ogGmoaATsT | | | |
| AD-12366 | GmocCmouGmogAmogUmouUmoaUmouCm | 1429 | UUCCGAAUAAACUCCAGGCTsT | 1430 |
| | ogGmoaATsT | | | |
| AD-12367 | GmocmocmouGGAGmoumoumouAmoumou | 1431 | UUCCGaaUAaaCUCCAggcTsT | 1432 |
| | mocGGAATsT | | | |
| AD-12368 | GmocmocmouGGAGmoumoumouAmoumou | 1433 | UUCCGAAuAAACUCcAGGCTsT | 1434 |
| | mocGGAATsT | | | |
| AD-12369 | GmocmocmouGGAGmoumoumouAmoumou | 1435 | UUCCGAAUAAACUCCAGGCTsT | 1436 |
| | mocGGAATsT | | | |
| AD-12370 | GmocmocmouGGAGmoumoumouAmoumou | 1437 | P-UfUfCfCfGAAUfAAACfUfCfCfAGGCfTsT | 1438 |
| | mocGGAATsT | | | |
| AD-12371 | GmocmocmouGGAGmoumoumouAmoumou | 1439 | P-UfUfCfCfGAAUfAAACfUfCfCfAGGCfsCfsUf | 1440 |
| | mocGGAATsT | | | |
| AD-12372 | GmocmocmouGGAGmoumoumouAmoumou | 1441 | P-uUfcCfgAfaUfaAfaCfuCfcAfgGfcsCfsu | 1442 |
| | mocGGAATsT | | | |
| AD-12373 | GmocmocmouGGAGmoumoumouAmoumou | 1443 | UUCCGAAUAAACUCCAGGCTsT | 1444 |
| | mocGGAATsT | | | |
| AD-12374 | GCfCfUfGGAGUfUfUfAUfUfCfGGAATsT | 1445 | UfUfCfCfGAAUfAAACfUfCfCfAGGCfTsT | 1446 |
| AD-12375 | GCfCfUfGGAGUfUfUfAUfUfCfGGAATsT | 1447 | UUCCGAAUAAACUCCAGGCTsT | 1448 |
| AD-12377 | GCfCfUfGGAGUfUfUfAUfUfCfGGAATsT | 1449 | uUcCGAAuAAACUccAGGCTsT | 1450 |
| AD-12378 | GCfCfUfGGAGUfUfUfAUfUfCfGGAATsT | 1451 | UUCCGaaUAaaCUCCAggcscsu | 1452 |
| AD-12379 | GCfCfUfGGAGUfUfUfAUfUfCfGGAATsT | 1453 | UUCCGAAUAAACUCCAGGCscsu | 1454 |
| AD-12380 | GCfCfUfGGAGUfUfUfAUfUfCfGGAATsT | 1455 | P-uUfcCfgAfaUfaAfaCfuCfcAfgGfcsCfsu | 1456 |
| AD-12381 | GCfCfUfGGAGUfUfUfAUfUfCfGGAATsT | 1457 | P-uUfcCfgAfaUfaAfaCfuCfcAfgGfcTsT | 1458 |
| AD-12382 | GCfCfUfGGAGUfUfUfAUfUfCfGGAATsT | 1459 | P-UfUfCfCfGAAUfAAACfUfCfCfAGGCfTsT | 1460 |
| AD-12383 | GCCUGGAGUUUAUUCGGAATsT | 1461 | P-UfUfCfCfGAAUfAAACfUfCfCfAGGCfTsT | 1462 |
| AD-12384 | GccuGGAGuuuAuucGGAATsT | 1463 | P-UfUfCfCfGAAUfAAACfUfCfCfAGGCfTsT | 1464 |
| AD-12385 | GcCuGgAgUuUaUuCgGaATsT | 1465 | P-UfUfCfCfGAAUfAAACfUfCfCfAGGCfTsT | 1466 |
| AD-12386 | GfcCfuGfgAfgUfuUfaUfuCfgGfaAf | 1467 | P-UfUfCfCfGAAUfAAACfUfCfCfAGGCfTsT | 1468 |
| AD-12387 | GCfCfUfGGAGGUfUfUfAUfUfCfGGAA | 1469 | UfUfCfCfGAAUfAAACfUfCfCfAGGCfsCfsUf | 1470 |
| AD-12388 | GCfCfUfGGAGGUfUfUfAUfUfCfGGAA | 1471 | P-uUfcCfgAfaUfaAfaCfuCfcAfgGfc | 1472 |
| AD-12389 | GCfCfUfGGAGGUfUfUfAUfUfCfGGAA | 1473 | P-uUfcCfgAfaUfaAfaCfuCfcAfgGfcsCfsu | 1474 |
| AD-12390 | GCfCfUfGGAGGUfUfUfAUfUfCfGGAA | 1475 | UUCCGAAUAAACUCCAGGCscsu | 1476 |
| AD-12391 | GCfCfUfGGAGGUfUfUfAUfUfCfGGAA | 1477 | UUCCGaaUAaaCUCCAggc | 1478 |
| AD-12392 | GCfCfUfGGAGGUfUfUfAUfUfCfGGAA | 1479 | UUCCGAAUAAACUCCAGGCTsT | 1480 |
| AD-12393 | GCfCfUfGGAGGUfUfUfAUfUfCfGGAA | 1481 | UUCCGAAuAAACUCcAGGCTsT | 1482 |
| AD-12394 | GCfCfUfGGAGGUfUfUfAUfUfCfGGAA | 1483 | uUcCGAAuAAACUccAGGCTsT | 1484 |
| AD-12395 | GmocCmouGmogAmogUmouUmoaUmouCm | 1485 | P-UfUfCfCfGAAUfAAACfUfCfCfAGGCfsCfsUf | 1486 |
| | ogGmoaATsT | | | |
| AD-12396 | GmocCmouGmogAmogUmouUmoaUmouCm | 1487 | P-UfUfCfCfGAAUfAAACfUfCfCfAGGCfsCfsUf | 1488 |
| | ogGmoaA | | | |
| AD-12397 | GfcCfuGfgAfgUfuUfaUfuCfgGfaAf | 1489 | P-UfUfCfCfGAAUfAAACfUfCfCfAGGCfsCfsUf | 1490 |
| AD-12398 | GfcCfuGfgAfgUfuUfaUfuCfgGfaAffsT | 1491 | P-UfUfCfCfGAAUfAAACfUfCfCfAGGCfsCfsUf | 1492 |
| AD-12399 | GcCuGgAgUuUaUuCgGaATsT | 1493 | P-UfUfCfCfGAAUfAAACfUfCfCfAGGCfsCfsUf | 1494 |
| AD-12400 | GCCUGGAGUUUAUUCGGAATsT | 1495 | P-UfUfCfCfGAAUfAAACfUfCfCfAGGCfsCfsUf | 1496 |
| AD-12401 | GccuGGAGuuuAuucGGAATsT | 1497 | P-UfUfCfCfGAAUfAAACfUfCfCfAGGCfsCfsUf | 1498 |
| AD-12402 | GccuGGAGuuuAuucGGAA | 1499 | P-UfUfCfCfGAAUfAAACfUfCfCfAGGCfsCfsUf | 1500 |
| AD-12403 | GCfCfUfGGAGGUfUfUfAUfUfCfGGAA | 1501 | P-UfUfCfCfGAAUfAAACfUfCfCfAGGCfsCfsUf | 1502 |
| AD-9314 | GCCUGGAGUUUAUUCGGAATsT | 1503 | UUCCGAAUAAACUCCAGGCTsT | 1504 |

¹U, C, A, G: corresponding ribonucleotide; T: deoxythymidine; u, c, a, g: corresponding 2′-O-methyl ribonucleotide; Uf, Cf, Af, Gf: corresponding 2′-deoxy-2′-fluoro ribonucleotide; moc, mou, mog, moa: corresponding 2′-MOE nucleotide; where nucleotides are written in sequence, they are connected by 3′-5′ phosphodiester groups; ab: 3′-terminal abasic nucleotide; nucleotides with interjected “s” are connected by 3′-O-5′-O phosphorothiodiester groups; unless denoted by prefix “p-”, oligonucleotides are devoid of a 5′-phosphate group on the 5′-most nucleotide; all oligonucleotides bear 3′-OH on the 3′-most nucleotide

TABLE 2

| | Remaining mRNA |
|---|---|
| | in % of controls |
| Duplex | at siRNA conc. |
| number | of 30 nM |
| AD-10792 | 15 |
| AD-10793 | 32 |
| AD-10796 | 13 |
| AD-12038 | 13 |
| AD-12039 | 29 |
| AD-12040 | 10 |
| AD-12041 | 11 |
| AD-12042 | 12 |
| AD-12043 | 13 |
| AD-12044 | 7 |
| AD-12045 | 8 |
| AD-12046 | 13 |
| AD-12047 | 17 |
| AD-12048 | 43 |
| AD-12049 | 34 |
| AD-12050 | 16 |
| AD-12051 | 31 |
| AD-12052 | 81 |
| AD-12053 | 46 |
| AD-12054 | 8 |
| AD-12055 | 13 |
| AD-12056 | 11 |
| AD-12057 | 8 |
| AD-12058 | 9 |
| AD-12059 | 23 |
| AD-12060 | 10 |
| AD-12061 | 7 |
| AD-12062 | 10 |
| AD-12063 | 19 |
| AD-12064 | 15 |
| AD-12065 | 16 |
| AD-12066 | 20 |
| AD-12067 | 17 |
| AD-12068 | 18 |
| AD-12069 | 13 |
| AD-12338 | 15 |
| AD-12339 | 14 |
| AD-12340 | 19 |
| AD-12341 | 12 |
| AD-12342 | 13 |
| AD-12343 | 24 |
| AD-12344 | 9 |
| AD-12345 | 12 |
| AD-12346 | 13 |
| AD-12347 | 11 |
| AD-12348 | 8 |
| AD-12349 | 11 |
| AD-12350 | 17 |
| AD-12351 | 11 |
| AD-12352 | 11 |
| AD-12354 | 11 |
| AD-12355 | 9 |
| AD-12356 | 25 |
| AD-12357 | 56 |
| AD-12358 | 29 |
| AD-12359 | 30 |
| AD-12360 | 15 |
| AD-12361 | 20 |
| AD-12362 | 51 |
| AD-12363 | 11 |
| AD-12364 | 25 |
| AD-12365 | 18 |
| AD-12366 | 23 |
| AD-12367 | 42 |
| AD-12368 | 40 |
| AD-12369 | 26 |
| AD-12370 | 68 |
| AD-12371 | 60 |
| AD-12372 | 60 |
| AD-12373 | 55 |
| AD-12374 | 9 |
| AD-12375 | 16 |
| AD-12377 | 88 |
| AD-12378 | 6 |
| AD-12379 | 6 |
| AD-12380 | 8 |
| AD-12381 | 10 |
| AD-12382 | 7 |
| AD-12383 | 7 |
| AD-12377 | 88 |
| AD-12378 | 6 |
| AD-12379 | 6 |
| AD-12380 | 8 |
| AD-12381 | 10 |
| AD-12382 | 7 |
| AD-12383 | 7 |
| AD-12384 | 8 |
| AD-12385 | 8 |
| AD-12386 | 11 |
| AD-12387 | 13 |
| AD-12388 | 19 |
| AD-12389 | 16 |
| AD-12390 | 17 |
| AD-12391 | 21 |
| AD-12392 | 28 |
| AD-12393 | 17 |
| AD-12394 | 75 |
| AD-12395 | 55 |
| AD-12396 | 59 |
| AD-12397 | 20 |
| AD-12398 | 11 |
| AD-12399 | 13 |
| AD-12400 | 12 |
| AD-12401 | 13 |
| AD-12402 | 14 |
| AD-12403 | 4 |
| AD-9314 | 9 |

INFORMAL SEQUENCE LISTING
SEQ ID NO:1505
<210> 1505
<211> 3636
<212> RNA
<213> Human
<220>
<223> PCSK9 mRNA
<400> 1505
cagcgacguc gaggcgcuca ugguugcagg cgggcgccgc cguucaguuc agggucugag 60
ccuggaggag ugagccaggc agugagacug gcucgggcgg gccgggacgc gucguugcag 120
cageggcucc cagcucccag ccaggauucc gegegccccu ucacgegece ugcuccugaa 180
cuucagcucc ugcacagucc uccccacege aaggcucaag gegccgccgg cguggaccgc 240
gcacggccuc uaggucuccu cgccaggaca gcaaccucuc cccuggcccu caugggcacc 300
gucagcucca ggcgguccug guggccgcug ccacugcugc ugcugcugcu gcugcuccug 360
ggucccgcgg gcgcccgugc gcaggaggac gaggacggcg acuacgagga gcuggugcua 420
gccuugcguu ccgaggagga cggccuggcc gaagcacceg agcacggaac cacagccacc 480
uuccaccgcu gegccaagga uccguggagg uugccuggca ccuacguggu ggugcugaag 540
gaggagaccc accucucgca gucagagege acugccegcc gccugcagge ccaggcugcc 600
cgceggggau accucaccaa gauccugcau gucuuccaug gccuucuucc uggcuuccug 660
gugaagauga guggcgaccu gcuggagcug gccuugaagu ugccccaugu cgacuacauc 720
gaggaggacu ccucugucuu ugcccagage aucccgugga accuggageg gauuaccccu 780
ccacgguacc gggeggauga auaccagccc cccgacggag gcagccuggu ggagguguau 840
cuccuagaca ccagcauaca gagugaccac cgggaaaucg agggcagggu cauggucacc 900
gacuucgaga augugcccga ggaggacggg acccgcuucc acagacaggc cagcaagugu 960
gacagucaug gcacccaccu ggcaggggug gucageggcc gggaugccgg cguggccaag 1020
ggugccagca ugcgcagccu gegegugcuc aacugccaag ggaagggcac gguuagcggc 1080
acccucauag gccuggaguu uauucggaaa agccagcugg uccagccugu ggggccacug 1140
guggugcugc ugccccugge ggguggguac agccgegucc ucaacgccgc cugccagegc 1200
cuggcgaggg cuggggucgu gcuggucacc gcugceggca acuuccggga cgaugccugc 1260
cucuacuccc cagccucage ucccgagguc aucacaguug gggccaccaa ugcccaagac 1320
cagccgguga cccuggggac uuuggggacc aacuuuggcc gcugugugga ccucuuugcc 1380
ccaggggagg acaucauugg ugccuccagc gacugcagca ccugcuuugu gucacagagu 1440
gggacaucac aggcugcugc ccacguggcu ggcauugcag ccaugaugcu gucugccgag 1500
ccggagcuca cccuggccga guugaggcag agacugaucc acuucucugc caaagauguc 1560
aucaaugagg ccugguuccc ugaggaccag cggguacuga cccccaaccu gguggccgcc 1620
cugcccccca gcacccaugg ggcagguugg cagcuguuuu gcaggacugu auggucagca 1680
cacucggggc cuacacggau ggccacagcc gucgcccgcu gegccccaga ugaggagcug 1740
cugagcugcu ccaguuucuc caggaguggg aagcggcggg gcgagcgcau ggaggcccaa 1800
gggggcaagc uggucugccg ggcccacaac gcuuuugggg gugagggugu cuacgccauu 1860
gccaggugcu gccugcuacc ccaggccaac ugcagegucc acacagcucc accagcugag 1920
gccagcaugg ggaccegugu ccacugccac caacagggcc acguccucac aggcugcagc 1980
ucccacuggg agguggagga ccuuggcacc cacaagccgc cugugcugag gccacgaggu 2040
cagcccaacc agugcguggg ccacagggag gccagcaucc acgcuuccug cugccaugcc 2100
ccaggucugg aaugcaaagu caaggagcau ggaaucccgg ccccucagga gcaggugacc 2160
guggccugcg aggagggcug gacccugacu ggcugcagug cccucccugg gaccucccac 2220
guccuggggg ccuacgccgu agacaacacg uguguaguca ggagccggga cgucagcacu 2280
acaggcagca ccagcgaagg ggccgugaca gccguugcca ucugcugccg gagccggcac 2340
cuggcgcagg ccucccagga gcuccaguga cagccccauc ccaggauggg ugucugggga 2400
gggucaaggg cuggggcuga geuuuaaaau gguuccgacu ugucccucuc ucagcccucc 2460
auggccuggc acgaggggau ggggaugcuu cegccuuucc ggggcugcug gccuggcccu 2520
ugaguggggc agccuccuug ccuggaacuc acucacucug ggugccuccu ccccaggugg 2580
aggugccagg aagcucccuc ccucacugug gggcauuuca ccauucaaac aggucgagcu 2640
gugcucgggu gcugccagcu gcucccaaug ugccgauguc cgugggcaga augacuuuua 2700
uugagcucuu guuccgugcc aggcauucaa uccucagguc uccaccaagg aggcaggauu 2760
cuucccaugg auaggggagg gggcgguagg ggcugcaggg acaaacaucg uuggggggug 2820
agugugaaag gugcugaugg cccucaucuc cagcuaacug uggagaagcc ccugggggcu 2880
cccugauuaa uggaggcuua gcuuucugga uggcaucuag ccagaggcug gagacaggug 2940
cgccccuggu ggucacaggc ugugccuugg uuuccugage caccuuuacu cugcucuaug 3000
ccaggcugug cuagcaacac ccaaaggugg ccugcgggga gccaucaccu aggacugacu 3060
cggcagugug caguggugca ugcacugucu cagccaacce gcuccacuac ccggcagggu 3120
acacauucgc accccuacuu cacagaggaa gaaaccugga accagagggg gcgugccugc 3180
caagcucaca cagcaggaac ugagccagaa acgcagauug ggcuggcucu gaagccaagc 3240
cucuucuuac uucacceggc ugggcuccuc auuuuuacgg guaacaguga ggcugggaag 3300
gggaacacag accaggaagc ucggugagug auggcagaac gaugccugca ggcauggaac 3360
uuuuuccguu aucacccagg ccugauucac uggccuggcg gagaugcuuc uaaggcaugg 3420
ucgggggaga gggccaacaa cugucccucc uugagcacca gccccaccca agcaagcaga 3480
cauuuaucuu uugggucugu ccucucuguu gccuuuuuac agccaacuuu ucuagaccug 3540
uuuugcuuuu guaacuugaa gauauuuauu cuggguuuug uagcauuuuu auuaauaugg 3600
ugacuuuuua aaauaaaaac aaacaaacgu uguccu 3636

1. A double-stranded ribonucleic acid (dsRNA) for inhibiting expression of a human proprotein convertase subtilisin kexin 9 (PCSK9) gene in a cell, wherein the dsRNA comprises a sense strand and an antisense strand complementary to at least 15 contiguous nucleotides of a PCSK9 gene and comprises a duplex structure between 15 and 30 base pairs in length.

2. The dsRNA of claim 1 comprising a duplex structure between 19 and 21 base pairs in length.

3. The dsRNA of claim 1 wherein the sense strand comprises the nucleotide sequence of of a sense strand of Table 1 and the antisense strand comprises the nucleotide sequence of an antisense strand of Table 1.

4. The dsRNA of claim 1, consisting of a sense strand and an antisense strand of Table 1.

5. The dsRNA of claim 1, consisting of a modified dsRNA of Table 2.

6. The dsRNA of claim 1, wherein the dsRNA comprises at least one modified nucleotide.

7. The dsRNA of claim 1, wherein the dsRNA comprises at least one 2′-O-methyl modified nucleotide and at least one nucleotide comprising a 5′-phosphorothioate group.

8. The dsRNA claim 1, wherein the dsRNA comprises at least one modified nucleotide, wherein the modified nucleotide is chosen from the group of: a 2′-O-methyl modified nucleotide, a 2′-deoxy-2′-fluoro modified nucleotide, a 2′-deoxy-modified nucleotide, a locked nucleotide, an abasic nucleotide, 2′-amino-modified nucleotide, 2′-alkyl-modified nucleotide, a morpholino nucleotide, a phosphoramidate, a nucleotide comprising a 5′-phosphorothioate group, a terminal nucleotide linked to a cholesteryl derivative or dodecanoic acid bisdecylamide group, and a non-natural base comprising nucleotide.

9. A cell comprising the dsRNA of claim 1.

10. A pharmaceutical composition comprising the dsRNA of claim 1 and a pharmaceutically acceptable carrier.

11. A composition comprising the dsRNA of claim 1 and a lipid formulation.

12. A composition comprising the dsRNA of claim 1 and a lipid formulation, wherein the lipid formulation comprises a cationic lipid comprising ND-98.

13. A vector comprising a regulatory sequence operably linked to a nucleotide sequence that encodes at least one strand of the dsRNA of claim 1.

14. A cell comprising the vector of claim 13.

15. The dsRNA of claim 1, wherein contacting a cell in vitro with 30 nM or less of the dsRNA and maintaining the cell for a time sufficient to obtain degradation of a mRNA transcript of a PCSK9 gene, inhibits expression of the PCSK9 gene in the cell.

16. The dsRNA of claim 1, wherein contacting HepG2 cells expressing the PCSK9 gene in vitro with the dsRNA and maintaining the cells for a time sufficient to obtain degradation of a mRNA transcript of a PCSK9 gene, inhibits expression of the PCSK9 gene in the cell by at least 20%.

17. The dsRNA of claim 1, wherein administering the dsRNA to an animal decreases total serum cholesterol in the animal.

18. A method for inhibiting expression of a proprotein convertase subtilisin kexin 9 (PCSK9) gene in a cell comprising contacting the cell with the dsRNA of claim 1 and maintaining the cell for a time sufficient to obtain degradation of a mRNA transcript of a PCSK9 gene, thereby inhibiting expression of the PCSK9 gene in the cell.

19. A method of treating or managing pathological processes which can be mediated by down regulating expression of a proprotein convertase subtilisin kexin 9 (PCSK9) gene comprising administering to a patient in need of such treatment or management a therapeutically effective amount of the dsRNA of claim 1.

The application's sequence listing, which the Patent Office published only in electronic form, follows.

SEQUENCE LISTING (1505 sequences)

SEQ ID NO: 1 - DNA, 21 bp, synthetic construct
  source 1..21: mol_type = other DNA
  modified_base 1: mod_base = OTHER; note = adenosine-3'-phosphate
  modified_base 2: mod_base = OTHER; note = guanosine-3'-phosphate
  modified_base 3: mod_base = OTHER; note = cytidine-3'-phosphate
  modified_base 4: mod_base = OTHER; note = guanosine-3'-phosphate
  modified_base 5: mod_base = OTHER; note = adenosine-3'-phosphate
  modified_base 6: mod_base = OTHER; note = cytidine-3'-phosphate
  modified_base 7: mod_base = OTHER; note = guanosine-3'-phosphate
  modified_base 8: mod_base = OTHER; note = uridine-3'-phosphate
  modified_base 9: mod_base = OTHER; note = cytidine-3'-phosphate
  modified_base 10: mod_base = OTHER; note = guanosine-3'-phosphate
  modified_base 11: mod_base = OTHER; note = adenosine-3'-phosphate
  modified_base 12: mod_base = OTHER; note = guanosine-3'-phosphate
  modified_base 13: mod_base = OTHER; note = guanosine-3'-phosphate
  modified_base 14: mod_base = OTHER; note = cytidine-3'-phosphate
  modified_base 15: mod_base = OTHER; note = guanosine-3'-phosphate
  modified_base 16: mod_base = OTHER; note = cytidine-3'-phosphate
  modified_base 17: mod_base = OTHER; note = uridine-3'-phosphate
  modified_base 18: mod_base = OTHER; note = cytidine-3'-phosphate
  modified_base 19: mod_base = OTHER; note = adenosine-3'-phosphate
  misc_feature 1..19: note = RNA
  misc_feature 20..21: note = DNA
agcgacgtcgaggcgctcatt

SEQ ID NO: 2 - DNA, 21 bp, synthetic construct
  source 1..21: mol_type = other DNA
  modified_base 1: mod_base = OTHER; note = uridine-3'-phosphate
  modified_base 2: mod_base = OTHER; note = guanosine-3'-phosphate
  modified_base 3: mod_base = OTHER; note = adenosine-3'-phosphate
  modified_base 4: mod_base = OTHER; note = guanosine-3'-phosphate
  modified_base 5: mod_base = OTHER; note = cytidine-3'-phosphate
  modified_base 6: mod_base = OTHER; note = guanosine-3'-phosphate
  modified_base 7: mod_base = OTHER; note = cytidine-3'-phosphate
  modified_base 8: mod_base = OTHER; note = cytidine-3'-phosphate
  modified_base 9: mod_base = OTHER; note = uridine-3'-phosphate
  modified_base 10: mod_base = OTHER; note = cytidine-3'-phosphate
  modified_base 11: mod_base = OTHER; note = guanosine-3'-phosphate
  modified_base 12: mod_base = OTHER; note = adenosine-3'-phosphate
  modified_base 13: mod_base = OTHER; note = cytidine-3'-phosphate
  modified_base 14: mod_base = OTHER; note = guanosine-3'-phosphate
  modified_base 15: mod_base = OTHER; note = uridine-3'-phosphate
  modified_base 16: mod_base = OTHER; note = cytidine-3'-phosphate
  modified_base 17: mod_base = OTHER; note = guanosine-3'-phosphate
  modified_base 18: mod_base = OTHER; note = cytidine-3'-phosphate
  modified_base 19: mod_base = OTHER; note = uridine-3'-phosphate
  misc_feature 1..19: note = RNA
  misc_feature 20..21: note = DNA
tgagcgcctcgacgtcgcttt

SEQ ID NO: 3 - DNA, 21 bp, synthetic construct
  source 1..21: mol_type = other DNA
  modified_base 1: mod_base = OTHER; note = cytidine-3'-phosphate
  modified_base 2: mod_base = OTHER; note = guanosine-3'-phosphate
  modified_base 3: mod_base = OTHER; note = cytidine-3'-phosphate
  modified_base 4: mod_base = OTHER; note = uridine-3'-phosphate
  modified_base 5: mod_base = OTHER; note = cytidine-3'-phosphate
  modified_base 6: mod_base = OTHER; note = adenosine-3'-phosphate
  modified_base 7: mod_base = OTHER; note = uridine-3'-phosphate
  modified_base 8: mod_base = OTHER; note = guanosine-3'-phosphate
  modified_base 9: mod_base = OTHER; note = guanosine-3'-phosphate
  modified_base 10: mod_base = OTHER; note = uridine-3'-phosphate
  modified_base 11: mod_base = OTHER; note = uridine-3'-phosphate
  modified_base 12: mod_base = OTHER; note = guanosine-3'-phosphate
  modified_base 13: mod_base = OTHER; note = cytidine-3'-phosphate
  modified_base 14: mod_base = OTHER; note = adenosine-3'-phosphate
  modified_base 15: mod_base = OTHER; note = guanosine-3'-phosphate
  modified_base 16: mod_base = OTHER; note = guanosine-3'-phosphate
  modified_base 17: mod_base = OTHER; note = cytidine-3'-phosphate
  modified_base 18: mod_base = OTHER; note = guanosine-3'-phosphate
  modified_base 19: mod_base = OTHER; note = guanosine-3'-phosphate
  misc_feature 1..19: note = RNA
  misc_feature 20..21: note = DNA
cgctcatggttgcaggcggtt

SEQ ID NO: 4 - DNA, 21 bp, synthetic construct
  source 1..21: mol_type = other DNA
  modified_base 1: mod_base = OTHER; note = cytidine-3'-phosphate
  modified_base 2: mod_base = OTHER; note = cytidine-3'-phosphate
  modified_base 3: mod_base = OTHER; note = guanosine-3'-phosphate
  modified_base 4: mod_base = OTHER; note = cytidine-3'-phosphate
  modified_base 5: mod_base = OTHER; note = cytidine-3'-phosphate
  modified_base 6: mod_base = OTHER; note = uridine-3'-phosphate
  modified_base 7: mod_base = OTHER; note = guanosine-3'-phosphate
  modified_base 8: mod_base = OTHER; note = cytidine-3'-phosphate
  modified_base 9: mod_base = OTHER; note = adenosine-3'-phosphate
  modified_base 10: mod_base = OTHER; note = adenosine-3'-phosphate
  modified_base 11: mod_base = OTHER; note = cytidine-3'-phosphate
  modified_base 12: mod_base = OTHER; note = cytidine-3'-phosphate
  modified_base 13: mod_base = OTHER; note = adenosine-3'-phosphate
  modified_base 14: mod_base = OTHER; note = uridine-3'-phosphate
  modified_base 15: mod_base = OTHER; note = guanosine-3'-phosphate
  modified_base 16: mod_base = OTHER; note = adenosine-3'-phosphate
  modified_base 17: mod_base = OTHER; note = guanosine-3'-phosphate
  modified_base 18: mod_base = OTHER; note = cytidine-3'-phosphate
  modified_base 19: mod_base = OTHER; note = guanosine-3'-phosphate
  misc_feature 1..19: note = RNA
  misc_feature 20..21: note = DNA
ccgcctgcaaccatgagcgtt

SEQ ID NO: 5 - DNA, 21 bp, synthetic construct
  source 1..21: mol_type = other DNA
  modified_base 1: mod_base = OTHER; note = guanosine-3'-phosphate
  modified_base 2: mod_base = OTHER; note = cytidine-3'-phosphate
  modified_base 3: mod_base = OTHER; note = uridine-3'-phosphate
  modified_base 4: mod_base = OTHER; note = cytidine-3'-phosphate
  modified_base 5: mod_base = OTHER; note = adenosine-3'-phosphate
  modified_base 6: mod_base = OTHER; note = uridine-3'-phosphate
  modified_base 7: mod_base = OTHER; note = guanosine-3'-phosphate
  modified_base 8: mod_base = OTHER; note = guanosine-3'-phosphate
  modified_base 9: mod_base = OTHER; note = uridine-3'-phosphate
  modified_base 10: mod_base = OTHER; note = uridine-3'-phosphate
  modified_base 11: mod_base = OTHER; note = guanosine-3'-phosphate
  modified_base 12: mod_base = OTHER; note = cytidine-3'-phosphate
  modified_base 13: mod_base = OTHER; note = adenosine-3'-phosphate
  modified_base 14: mod_base = OTHER; note = guanosine-3'-phosphate
  modified_base 15: mod_base = OTHER; note = guanosine-3'-phosphate
  modified_base 16: mod_base = OTHER; note = cytidine-3'-phosphate
  modified_base 17: mod_base = OTHER; note = guanosine-3'-phosphate
  modified_base 18: mod_base = OTHER; note = guanosine-3'-phosphate
  modified_base 19: mod_base = OTHER; note = guanosine-3'-phosphate
  misc_feature 1..19: note = RNA
  misc_feature 20..21: note = DNA
gctcatggttgcaggcgggtt

SEQ ID NO: 6 - DNA, 21 bp, synthetic construct
  source 1..21: mol_type = other DNA
  modified_base 1: mod_base = OTHER; note = cytidine-3'-phosphate
  modified_base 2: mod_base = OTHER; note = cytidine-3'-phosphate
  modified_base 3: mod_base = OTHER; note = cytidine-3'-phosphate
  modified_base 4: mod_base = OTHER; note = guanosine-3'-phosphate
  modified_base 5: mod_base = OTHER; note = cytidine-3'-phosphate
  modified_base 6: mod_base = OTHER; note = cytidine-3'-phosphate
  modified_base 7: mod_base = OTHER; note = uridine-3'-phosphate
  modified_base 8: mod_base = OTHER; note = guanosine-3'-phosphate
  modified_base 9: mod_base = OTHER; note = cytidine-3'-phosphate
  modified_base 10: mod_base = OTHER; note = adenosine-3'-phosphate
  modified_base 11: mod_base = OTHER; note = adenosine-3'-phosphate
  modified_base 12: mod_base = OTHER; note = cytidine-3'-phosphate
  modified_base 13: mod_base = OTHER; note = cytidine-3'-phosphate
  modified_base 14: mod_base = OTHER; note = adenosine-3'-phosphate
  modified_base 15: mod_base = OTHER; note = uridine-3'-phosphate
  modified_base 16: mod_base = OTHER; note = guanosine-3'-phosphate
  modified_base 17: mod_base = OTHER; note = adenosine-3'-phosphate
  modified_base 18: mod_base = OTHER; note = guanosine-3'-phosphate
  modified_base 19: mod_base = OTHER; note = cytidine-3'-phosphate
  misc_feature 1..19: note = RNA
  misc_feature 20..21: note = DNA
cccgcctgcaaccatgagctt

SEQ ID NO: 7 - DNA, 21 bp, synthetic construct
  source 1..21: mol_type = other DNA
  modified_base 1: mod_base = OTHER; note = guanosine-3'-phosphate
  modified_base 2: mod_base = OTHER; note = cytidine-3'-phosphate
  modified_base 3: mod_base = OTHER; note = guanosine-3'-phosphate
  modified_base 4: mod_base = OTHER; note = guanosine-3'-phosphate
  modified_base 5: mod_base = OTHER; note = guanosine-3'-phosphate
  modified_base 6: mod_base = OTHER; note = cytidine-3'-phosphate
  modified_base 7: mod_base = OTHER; note = guanosine-3'-phosphate
  modified_base 8: mod_base = OTHER; note = cytidine-3'-phosphate
  modified_base 9: mod_base = OTHER; note = cytidine-3'-phosphate
  modified_base 10: mod_base = OTHER; note = guanosine-3'-phosphate
  modified_base 11: mod_base = OTHER; note = cytidine-3'-phosphate
  modified_base 12: mod_base = OTHER; note = cytidine-3'-phosphate
  modified_base 13: mod_base = OTHER; note = guanosine-3'-phosphate
  modified_base 14: mod_base = OTHER; note = uridine-3'-phosphate
  modified_base 15: mod_base = OTHER; note = uridine-3'-phosphate
  modified_base 16: mod_base = OTHER; note = cytidine-3'-phosphate
  modified_base 17: mod_base = OTHER; note = adenosine-3'-phosphate
  modified_base 18: mod_base = OTHER; note = guanosine-3'-phosphate
  modified_base 19: mod_base = OTHER; note = uridine-3'-phosphate
  misc_feature 1..19: note = RNA
  misc_feature 20..21: note = DNA
gcgggcgccgccgttcagttt

SEQ ID NO: 8 - DNA, 21 bp, synthetic construct
  source 1..21: mol_type = other DNA
  modified_base 1: mod_base = OTHER; note = adenosine-3'-phosphate
  modified_base 2: mod_base = OTHER; note = cytidine-3'-phosphate
  modified_base 3: mod_base = OTHER; note = uridine-3'-phosphate
  modified_base 4: mod_base = OTHER; note = guanosine-3'-phosphate
  modified_base 5: mod_base = OTHER; note = adenosine-3'-phosphate
  modified_base 6: mod_base = OTHER; note = adenosine-3'-phosphate
  modified_base 7: mod_base = OTHER; note = cytidine-3'-phosphate
  modified_base 8: mod_base = OTHER; note = guanosine-3'-phosphate
  modified_base 9: mod_base = OTHER; note = guanosine-3'-phosphate
  modified_base 10: mod_base = OTHER; note = cytidine-3'-phosphate
  modified_base 11: mod_base = OTHER; note = guanosine-3'-phosphate
  modified_base 12: mod_base = OTHER; note = guanosine-3'-phosphate
  modified_base 13: mod_base = OTHER; note = cytidine-3'-phosphate
  modified_base 14: mod_base = OTHER; note = guanosine-3'-phosphate
  modified_base 15: mod_base = OTHER; note = cytidine-3'-phosphate
  modified_base 16: mod_base = OTHER; note = cytidine-3'-phosphate
  modified_base 17: mod_base = OTHER; note = cytidine-3'-phosphate
  modified_base 18: mod_base = OTHER; note = guanosine-3'-phosphate
  modified_base 19: mod_base = OTHER; note = cytidine-3'-phosphate
  misc_feature 1..19: note = RNA
  misc_feature 20..21: note = DNA
actgaacggcggcgcccgctt

SEQ ID NO: 9 - DNA, 21 bp, synthetic construct
  source 1..21: mol_type = other DNA
  modified_base 1: mod_base = OTHER; note = cytidine-3'-phosphate
  modified_base 2: mod_base = OTHER; note = guanosine-3'-phosphate
  modified_base 3: mod_base = OTHER; note = guanosine-3'-phosphate
  modified_base 4: mod_base = OTHER; note = guanosine-3'-phosphate
  modified_base 5: mod_base = OTHER; note = cytidine-3'-phosphate
  modified_base 6: mod_base = OTHER; note = guanosine-3'-phosphate
  modified_base 7: mod_base = OTHER; note = cytidine-3'-phosphate
  modified_base 8: mod_base = OTHER; note = cytidine-3'-phosphate
  modified_base 9: mod_base = OTHER; note = guanosine-3'-phosphate
  modified_base 10: mod_base = OTHER; note = cytidine-3'-phosphate
  modified_base 11: mod_base = OTHER; note = cytidine-3'-phosphate
  modified_base 12: mod_base = OTHER; note = guanosine-3'-phosphate
  modified_base 13: mod_base = OTHER; note = uridine-3'-phosphate
  modified_base 14: mod_base = OTHER; note = uridine-3'-phosphate
  modified_base 15: mod_base = OTHER; note = cytidine-3'-phosphate
  modified_base 16: mod_base = OTHER; note = adenosine-3'-phosphate
  modified_base 17: mod_base = OTHER; note = guanosine-3'-phosphate
  modified_base 18: mod_base = OTHER; note = uridine-3'-phosphate
  modified_base 19: mod_base = OTHER; note = uridine-3'-phosphate
  misc_feature 1..19: note = RNA
  misc_feature 20..21: note = DNA
cgggcgccgccgttcagtttt

SEQ ID NO: 10 - DNA, 21 bp, synthetic construct
  source 1..21: mol_type = other DNA
  modified_base 1: mod_base = OTHER; note = adenosine-3'-phosphate
  modified_base 2: mod_base = OTHER; note = adenosine-3'-phosphate
  modified_base 3: mod_base = OTHER; note = cytidine-3'-phosphate
  modified_base 4: mod_base = OTHER; note = uridine-3'-phosphate
  modified_base 5: mod_base = OTHER; note = guanosine-3'-phosphate
  modified_base 6: mod_base = OTHER; note = adenosine-3'-phosphate
  modified_base 7: mod_base = OTHER; note = adenosine-3'-phosphate
  modified_base 8: mod_base = OTHER; note = cytidine-3'-phosphate
  modified_base 9: mod_base = OTHER; note = guanosine-3'-phosphate
  modified_base 10: mod_base = OTHER; note = guanosine-3'-phosphate
  modified_base 11: mod_base = OTHER; note = cytidine-3'-phosphate
  modified_base 12: mod_base = OTHER; note = guanosine-3'-phosphate
  modified_base 13: mod_base = OTHER; note = guanosine-3'-phosphate
  modified_base 14: mod_base = OTHER; note = cytidine-3'-phosphate
  modified_base 15: mod_base = OTHER; note = guanosine-3'-phosphate
  modified_base 16: mod_base = OTHER; note = cytidine-3'-phosphate
  modified_base 17: mod_base = OTHER; note = cytidine-3'-phosphate
  modified_base 18: mod_base = OTHER; note = cytidine-3'-phosphate
  modified_base 19: mod_base = OTHER; note = guanosine-3'-phosphate
  misc_feature 1..19: note = RNA
  misc_feature 20..21: note = DNA
aactgaacggcggcgcccgtt

SEQ ID NO: 11 - DNA, 21 bp, synthetic construct
  source 1..21: mol_type = other DNA
  modified_base 1: mod_base = OTHER; note = guanosine-3'-phosphate
  modified_base 2: mod_base = OTHER; note = guanosine-3'-phosphate
  modified_base 3: mod_base = OTHER; note = guanosine-3'-phosphate
  modified_base 4: mod_base = OTHER; note = cytidine-3'-phosphate
  modified_base 5: mod_base = OTHER; note = guanosine-3'-phosphate
  modified_base 6: mod_base = OTHER; note = cytidine-3'-phosphate
  modified_base 7: mod_base = OTHER; note = cytidine-3'-phosphate
  modified_base 8: mod_base = OTHER; note = guanosine-3'-phosphate
  modified_base 9: mod_base = OTHER; note = cytidine-3'-phosphate
  modified_base 10: mod_base = OTHER; note = cytidine-3'-phosphate
  modified_base 11: mod_base = OTHER; note = guanosine-3'-phosphate
  modified_base 12: mod_base = OTHER; note = uridine-3'-phosphate
  modified_base 13: mod_base = OTHER; note = uridine-3'-phosphate
  modified_base 14: mod_base = OTHER; note = cytidine-3'-phosphate
  modified_base 15: mod_base = OTHER; note = adenosine-3'-phosphate
  modified_base 16: mod_base = OTHER; note = guanosine-3'-phosphate
  modified_base 17: mod_base = OTHER; note = uridine-3'-phosphate
  modified_base 18: mod_base = OTHER; note = uridine-3'-phosphate
  modified_base 19: mod_base = OTHER; note = cytidine-3'-phosphate
  misc_feature 1..19: note = RNA
  misc_feature 20..21: note = DNA
gggcgccgccgttcagttctt

SEQ ID NO: 12 - DNA, 21 bp, synthetic construct
  source 1..21: mol_type = other DNA
  modified_base 1: mod_base = OTHER; note = guanosine-3'-phosphate
  modified_base 2: mod_base = OTHER; note = adenosine-3'-phosphate
  modified_base 3: mod_base = OTHER; note = adenosine-3'-phosphate
  modified_base 4: mod_base = OTHER; note = cytidine-3'-phosphate
  modified_base 5: mod_base = OTHER; note = uridine-3'-phosphate
  modified_base 6: mod_base = OTHER; note = guanosine-3'-phosphate
  modified_base 7: mod_base = OTHER; note = adenosine-3'-phosphate
  modified_base 8: mod_base = OTHER; note = adenosine-3'-phosphate
  modified_base 9: mod_base = OTHER; note = cytidine-3'-phosphate
  modified_base 10: mod_base = OTHER; note = guanosine-3'-phosphate
  modified_base 11: mod_base = OTHER; note = guanosine-3'-phosphate
  modified_base 12: mod_base = OTHER; note = cytidine-3'-phosphate
  modified_base 13: mod_base = OTHER; note = guanosine-3'-phosphate
  modified_base 14: mod_base = OTHER; note = guanosine-3'-phosphate
  modified_base 15: mod_base = OTHER; note = cytidine-3'-phosphate
  modified_base 16: mod_base = OTHER; note = guanosine-3'-phosphate
  modified_base 17: mod_base = OTHER; note = cytidine-3'-phosphate
  modified_base 18: mod_base = OTHER; note = cytidine-3'-phosphate
  modified_base 19: mod_base = OTHER; note = cytidine-3'-phosphate
  misc_feature 1..19: note = RNA
  misc_feature 20..21: note = DNA
gaactgaacggcggcgccctt

SEQ ID NO: 13 - DNA, 21 bp, synthetic construct
  source 1..21: mol_type = other DNA
  modified_base 1: mod_base = OTHER; note = cytidine-3'-phosphate
  modified_base 2: mod_base = OTHER; note = cytidine-3'-phosphate
  modified_base 3: mod_base = OTHER; note = guanosine-3'-phosphate
  modified_base 4: mod_base = OTHER; note = uridine-3'-phosphate
  modified_base 5: mod_base = OTHER; note = uridine-3'-phosphate
  modified_base 6: mod_base = OTHER; note = cytidine-3'-phosphate
  modified_base 7: mod_base = OTHER; note = adenosine-3'-phosphate
  modified_base 8: mod_base = OTHER; note = guanosine-3'-phosphate
  modified_base 9: mod_base = OTHER; note = uridine-3'-phosphate
  modified_base 10: mod_base = OTHER; note = uridine-3'-phosphate
  modified_base 11: mod_base = OTHER; note = cytidine-3'-phosphate
  modified_base 12: mod_base = OTHER; note = adenosine-3'-phosphate
  modified_base 13: mod_base = OTHER; note = guanosine-3'-phosphate
  modified_base 14: mod_base = OTHER; note = guanosine-3'-phosphate
  modified_base 15: mod_base = OTHER; note = guanosine-3'-phosphate
  modified_base 16: mod_base = OTHER; note = uridine-3'-phosphate
  modified_base 17: mod_base = OTHER; note = cytidine-3'-phosphate
  modified_base 18: mod_base = OTHER; note = uridine-3'-phosphate
  modified_base 19: mod_base = OTHER; note = guanosine-3'-phosphate
  misc_feature 1..19: note = RNA
  misc_feature 20..21: note = DNA
ccgttcagttcagggtctgtt

SEQ ID NO: 14 - DNA, 21 bp, synthetic construct
  source 1..21: mol_type = other DNA
  modified_base 1: mod_base = OTHER; note = cytidine-3'-phosphate
  modified_base 2: mod_base = OTHER; note = adenosine-3'-phosphate
  modified_base 3: mod_base = OTHER; note = guanosine-3'-phosphate
  modified_base 4: mod_base = OTHER; note = adenosine-3'-phosphate
  modified_base 5: mod_base = OTHER; note = cytidine-3'-phosphate
  modified_base 6: mod_base = OTHER; note = cytidine-3'-phosphate
  modified_base 7: mod_base = OTHER; note = cytidine-3'-phosphate
  modified_base 8: mod_base = OTHER; note = uridine-3'-phosphate
  modified_base 9: mod_base = OTHER; note = guanosine-3'-phosphate
  modified_base 10: mod_base = OTHER; note = adenosine-3'-phosphate
  modified_base 11: mod_base = OTHER; note = adenosine-3'-phosphate
  modified_base 12: mod_base = OTHER; note = cytidine-3'-phosphate
  modified_base 13: mod_base = OTHER; note = uridine-3'-phosphate
  modified_base 14: mod_base = OTHER; note = guanosine-3'-phosphate
  modified_base 15: mod_base = OTHER; note = adenosine-3'-phosphate
  modified_base 16: mod_base = OTHER; note = adenosine-3'-phosphate
  modified_base 17: mod_base = OTHER; note = cytidine-3'-phosphate
  modified_base 18: mod_base = OTHER; note = guanosine-3'-phosphate
  modified_base 19: mod_base = OTHER; note = guanosine-3'-phosphate
  misc_feature 1..19: note = RNA
  misc_feature 20..21: note = DNA
cagaccctgaactgaacggtt

SEQ ID NO: 15 - DNA, 21 bp, synthetic construct
  source 1..21: mol_type = other DNA
  modified_base 1: mod_base = OTHER; note = uridine-3'-phosphate
  modified_base 2: mod_base = OTHER; note = uridine-3'-phosphate
  modified_base 3: mod_base = OTHER; note = cytidine-3'-phosphate
  modified_base 4: mod_base = OTHER; note = adenosine-3'-phosphate
  modified_base 5: mod_base = OTHER; note = guanosine-3'-phosphate
  modified_base 6: mod_base = OTHER; note = uridine-3'-phosphate
  modified_base 7: mod_base = OTHER; note = uridine-3'-phosphate
  modified_base 8: mod_base = OTHER; note = cytidine-3'-phosphate
  modified_base 9: mod_base = OTHER; note = adenosine-3'-phosphate
  modified_base 10: mod_base = OTHER; note = guanosine-3'-phosphate
  modified_base 11: mod_base = OTHER; note = guanosine-3'-phosphate
  modified_base 12: mod_base = OTHER; note = guanosine-3'-phosphate
  modified_base 13: mod_base = OTHER; note = uridine-3'-phosphate
  modified_base 14: mod_base = OTHER; note = cytidine-3'-phosphate
  modified_base 15: mod_base = OTHER; note = uridine-3'-phosphate
  modified_base 16: mod_base = OTHER; note = guanosine-3'-phosphate
  modified_base 17: mod_base = OTHER; note = adenosine-3'-phosphate
  modified_base 18: mod_base = OTHER; note = guanosine-3'-phosphate
  modified_base 19: mod_base = OTHER; note = cytidine-3'-phosphate
  misc_feature 1..19: note = RNA
  misc_feature 20..21: note = DNA
ttcagttcagggtctgagctt

SEQ ID NO: 16 - DNA, 21 bp, synthetic construct
  source 1..21: mol_type = other DNA
  modified_base 1: mod_base = OTHER; note = guanosine-3'-phosphate
  modified_base 2: mod_base = OTHER; note = cytidine-3'-phosphate
  modified_base 3: mod_base = OTHER; note = uridine-3'-phosphate
  modified_base 4: mod_base = OTHER; note = cytidine-3'-phosphate
  modified_base 5: mod_base = OTHER; note = adenosine-3'-phosphate
  modified_base 6: mod_base = OTHER; note = guanosine-3'-phosphate
  modified_base 7: mod_base = OTHER; note = adenosine-3'-phosphate
  modified_base 8: mod_base = OTHER; note = cytidine-3'-phosphate
  modified_base 9: mod_base = OTHER; note = cytidine-3'-phosphate
  modified_base 10: mod_base = OTHER; note = cytidine-3'-phosphate
  modified_base 11: mod_base = OTHER; note = uridine-3'-phosphate
  modified_base 12: mod_base = OTHER; note = guanosine-3'-phosphate
  modified_base 13: mod_base = OTHER; note = adenosine-3'-phosphate
  modified_base 14: mod_base = OTHER; note = adenosine-3'-phosphate
  modified_base 15: mod_base = OTHER; note = cytidine-3'-phosphate
  modified_base 16: mod_base = OTHER; note = uridine-3'-phosphate
  modified_base 17: mod_base = OTHER; note = guanosine-3'-phosphate
  modified_base 18: mod_base = OTHER; note = adenosine-3'-phosphate
  modified_base 19: mod_base = OTHER; note = adenosine-3'-phosphate
  misc_feature 1..19: note = RNA
  misc_feature 20..21: note = DNA
gctcagaccctgaactgaatt

SEQ ID NO: 17 - DNA, 21 bp, synthetic construct
  source 1..21: mol_type = other DNA
  modified_base 1: mod_base = OTHER; note = guanosine-3'-phosphate
  modified_base 2: mod_base = OTHER; note = uridine-3'-phosphate
  modified_base 3: mod_base = OTHER; note = guanosine-3'-phosphate
  modified_base 4: mod_base = OTHER; note = adenosine-3'-phosphate
  modified_base 5: mod_base = OTHER; note = guanosine-3'-phosphate
  modified_base 6: mod_base = OTHER; note = adenosine-3'-phosphate
  modified_base 7: mod_base = OTHER; note = cytidine-3'-phosphate
  modified_base 8: mod_base = OTHER; note = uridine-3'-phosphate
  modified_base 9: mod_base = OTHER; note = guanosine-3'-phosphate
  modified_base 10: mod_base = OTHER; note = guanosine-3'-phosphate
  modified_base 11: mod_base = OTHER; note = cytidine-3'-phosphate
  modified_base 12: mod_base = OTHER; note = uridine-3'-phosphate
  modified_base 13: mod_base = OTHER; note = cytidine-3'-phosphate
  modified_base 14: mod_base = OTHER; note = guanosine-3'-phosphate
  modified_base 15: mod_base = OTHER; note = guanosine-3'-phosphate
  modified_base 16: mod_base = OTHER; note = guanosine-3'-phosphate
  modified_base 17: mod_base = OTHER; note = cytidine-3'-phosphate
  modified_base 18: mod_base = OTHER; note = guanosine-3'-phosphate
  modified_base 19: mod_base = OTHER; note = guanosine-3'-phosphate
  misc_feature 1..19: note = RNA
  misc_feature 20..21: note = DNA
gtgagactggctcgggcggtt

SEQ ID NO: 18 - DNA, 21 bp, synthetic construct
  source 1..21: mol_type = other DNA
  modified_base 1: mod_base = OTHER; note = cytidine-3'-phosphate
  modified_base 2: mod_base = OTHER; note = cytidine-3'-phosphate
  modified_base 3: mod_base = OTHER; note = guanosine-3'-phosphate
  modified_base 4: mod_base = OTHER; note = cytidine-3'-phosphate
  modified_base 5: mod_base = OTHER; note = cytidine-3'-phosphate
  modified_base 6: mod_base = OTHER; note = cytidine-3'-phosphate
  modified_base 7: mod_base = OTHER; note = guanosine-3'-phosphate
  modified_base 8: mod_base = OTHER; note = adenosine-3'-phosphate
  modified_base 9: mod_base = OTHER; note = guanosine-3'-phosphate
  modified_base 10: mod_base = OTHER; note = cytidine-3'-phosphate
  modified_base 11: mod_base = OTHER; note = cytidine-3'-phosphate
  modified_base 12: mod_base = OTHER; note = adenosine-3'-phosphate
  modified_base 13: mod_base = OTHER; note = guanosine-3'-phosphate
  modified_base 14: mod_base = OTHER; note = uridine-3'-phosphate
  modified_base 15: mod_base = OTHER; note = cytidine-3'-phosphate
  modified_base 16: mod_base = OTHER; note = uridine-3'-phosphate
  modified_base 17: mod_base = OTHER; note = cytidine-3'-phosphate
  modified_base 18: mod_base = OTHER; note = adenosine-3'-phosphate
  modified_base 19: mod_base = OTHER; note = cytidine-3'-phosphate
  misc_feature 1..19: note = RNA
  misc_feature 20..21: note = DNA
ccgcccgagccagtctcactt

SEQ ID NO: 19 - DNA, 21 bp, synthetic construct
  source 1..21: mol_type = other DNA
  modified_base 1: mod_base = OTHER; note = guanosine-3'-phosphate
  modified_base 2: mod_base = OTHER; note = guanosine-3'-phosphate
  modified_base 3: mod_base = OTHER; note = cytidine-3'-phosphate
  modified_base 4: mod_base = OTHER; note = cytidine-3'-phosphate
  modified_base 5: mod_base = OTHER; note = guanosine-3'-phosphate
  modified_base 6: mod_base = OTHER; note = guanosine-3'-phosphate
  modified_base 7: mod_base = OTHER; note = guanosine-3'-phosphate
  modified_base 8: mod_base = OTHER; note = adenosine-3'-phosphate
  modified_base 9: mod_base = OTHER; note = cytidine-3'-phosphate
  modified_base 10: mod_base = OTHER; note = guanosine-3'-phosphate
  modified_base 11: mod_base = OTHER; note = cytidine-3'-phosphate
  modified_base 12: mod_base = OTHER; note = guanosine-3'-phosphate
  modified_base 13: mod_base = OTHER; note = uridine-3'-phosphate
  modified_base 14: mod_base = OTHER; note = cytidine-3'-phosphate
  modified_base 15: mod_base = OTHER; note = guanosine-3'-phosphate
  modified_base 16: mod_base = OTHER; note = uridine-3'-phosphate
  modified_base 17: mod_base = OTHER; note = uridine-3'-phosphate
  modified_base 18: mod_base = OTHER; note = guanosine-3'-phosphate
  modified_base 19: mod_base = OTHER; note = cytidine-3'-phosphate
  misc_feature 1..19: note = RNA
  misc_feature 20..21: note = DNA
ggccgggacgcgtcgttgctt

SEQ ID NO: 20 - DNA, 21 bp, synthetic construct
  source 1..21: mol_type = other DNA
  modified_base 1: mod_base = OTHER; note = guanosine-3'-phosphate
  modified_base 2: mod_base = OTHER; note = cytidine-3'-phosphate
  modified_base 3: mod_base = OTHER; note = adenosine-3'-phosphate
  modified_base 4: mod_base = OTHER; note = adenosine-3'-phosphate
  modified_base 5: mod_base = OTHER; note = cytidine-3'-phosphate
  modified_base 6: mod_base = OTHER; note = guanosine-3'-phosphate
  modified_base 7: mod_base = OTHER; note = adenosine-3'-phosphate
  modified_base 8: mod_base = OTHER; note = cytidine-3'-phosphate
  modified_base 9: mod_base = OTHER; note = guanosine-3'-phosphate
  modified_base 10: mod_base = OTHER; note = cytidine-3'-phosphate
  modified_base 11: mod_base = OTHER; note = guanosine-3'-phosphate
  modified_base 12: mod_base = OTHER; note = uridine-3'-phosphate
  modified_base 13: mod_base = OTHER; note = cytidine-3'-phosphate
  modified_base 14: mod_base = OTHER; note = cytidine-3'-phosphate
  modified_base 15: mod_base = OTHER; note = cytidine-3'-phosphate
  modified_base 16: mod_base = OTHER; note = guanosine-3'-phosphate
  modified_base 17: mod_base = OTHER; note = guanosine-3'-phosphate
  modified_base 18: mod_base = OTHER; note = cytidine-3'-phosphate
  modified_base 19: mod_base = OTHER; note = cytidine-3'-phosphate
  misc_feature 1..19: note = RNA
  misc_feature 20..21: note = DNA
gcaacgacgcgtcccggcctt

SEQ ID NO: 21 - DNA, 21 bp, synthetic construct
  source 1..21: mol_type = other DNA
  modified_base 1: mod_base = OTHER; note = guanosine-3'-phosphate
  modified_base 2: mod_base = OTHER; note = cytidine-3'-phosphate
  modified_base 3: mod_base = OTHER; note = cytidine-3'-phosphate
  modified_base 4: mod_base = OTHER; note = guanosine-3'-phosphate
  modified_base 5: mod_base = OTHER; note = guanosine-3'-phosphate
  modified_base 6: mod_base = OTHER; note = guanosine-3'-phosphate
  modified_base 7: mod_base = OTHER; note = adenosine-3'-phosphate
  modified_base 8: mod_base = OTHER; note = cytidine-3'-phosphate
  modified_base 9: mod_base = OTHER; note = guanosine-3'-phosphate
  modified_base 10: mod_base = OTHER; note = cytidine-3'-phosphate
  modified_base 11: mod_base = OTHER; note = guanosine-3'-phosphate
  modified_base 12: mod_base = OTHER; note = uridine-3'-phosphate
  modified_base 13: mod_base = OTHER; note = cytidine-3'-phosphate
  modified_base 14: mod_base = OTHER; note = guanosine-3'-phosphate
  modified_base 15: mod_base = OTHER; note = uridine-3'-phosphate
  modified_base 16: mod_base = OTHER; note = uridine-3'-phosphate
  modified_base 17: mod_base = OTHER; note = guanosine-3'-phosphate
  modified_base 18: mod_base = OTHER; note = cytidine-3'-phosphate
  modified_base 19: mod_base = OTHER; note = adenosine-3'-phosphate
  misc_feature 1..19: note = RNA
  misc_feature 20..21: note = DNA
gccgggacgcgtcgttgcatt

SEQ ID NO: 22 - DNA, 21 bp, synthetic construct
  source 1..21: mol_type = other DNA
  modified_base 1: mod_base = OTHER; note = uridine-3'-phosphate
  modified_base 2: mod_base = OTHER; note = guanosine-3'-phosphate
  modified_base 3: mod_base = OTHER; note = cytidine-3'-phosphate
  modified_base 4: mod_base = OTHER; note = adenosine-3'-phosphate
  modified_base 5: mod_base = OTHER; note = adenosine-3'-phosphate
  modified_base 6: mod_base = OTHER; note = cytidine-3'-phosphate
  modified_base 7: mod_base = OTHER; note = guanosine-3'-phosphate
  modified_base 8: mod_base = OTHER; note = adenosine-3'-phosphate
  modified_base 9: mod_base = OTHER; note = cytidine-3'-phosphate
  modified_base 10: mod_base = OTHER; note = guanosine-3'-phosphate
  modified_base 11: mod_base = OTHER; note = cytidine-3'-phosphate
  modified_base 12: mod_base = OTHER; note = guanosine-3'-phosphate
  modified_base 13: mod_base = OTHER; note = uridine-3'-phosphate
  modified_base 14: mod_base = OTHER; note = cytidine-3'-phosphate
  modified_base 15: mod_base = OTHER; note = cytidine-3'-phosphate
  modified_base 16: mod_base = OTHER; note = cytidine-3'-phosphate
  modified_base 17: mod_base = OTHER; note = guanosine-3'-phosphate
  modified_base 18: mod_base = OTHER; note = guanosine-3'-phosphate
  modified_base 19: mod_base = OTHER; note = cytidine-3'-phosphate
  misc_feature 1..19: note = RNA
  misc_feature 20..21: note = DNA
tgcaacgacgcgtcccggctt

SEQ ID NO: 23 - DNA, 21 bp, synthetic construct
  source 1..21: mol_type = other DNA
  modified_base 1: mod_base = OTHER; note = cytidine-3'-phosphate
  modified_base 2: mod_base = OTHER; note = cytidine-3'-phosphate
  modified_base 3: mod_base = OTHER; note = guanosine-3'-phosphate
  modified_base 4: mod_base = OTHER; note = guanosine-3'-phosphate
  modified_base 5: mod_base = OTHER; note = guanosine-3'-phosphate
  modified_base 6: mod_base = OTHER; note = adenosine-3'-phosphate
  modified_base 7: mod_base = OTHER; note = cytidine-3'-phosphate
  modified_base 8: mod_base = OTHER; note = guanosine-3'-phosphate
  modified_base 9: mod_base = OTHER; note = cytidine-3'-phosphate
  modified_base 10: mod_base = OTHER; note = guanosine-3'-phosphate
  modified_base 11: mod_base = OTHER; note = uridine-3'-phosphate
  modified_base 12: mod_base = OTHER; note = cytidine-3'-phosphate
  modified_base 13: mod_base = OTHER; note = guanosine-3'-phosphate
  modified_base 14: mod_base = OTHER; note = uridine-3'-phosphate
  modified_base 15: mod_base = OTHER; note = uridine-3'-phosphate
  modified_base 16: mod_base = OTHER; note = guanosine-3'-phosphate
  modified_base 17: mod_base = OTHER; note = cytidine-3'-phosphate
  modified_base 18: mod_base = OTHER; note = adenosine-3'-phosphate
  modified_base 19: mod_base = OTHER; note = guanosine-3'-phosphate
  misc_feature 1..19: note = RNA
  misc_feature 20..21: note = DNA
ccgggacgcgtcgttgcagtt

SEQ ID NO: 24 - DNA, 21 bp, synthetic construct
  source 1..21: mol_type = other DNA
  modified_base 1: mod_base = OTHER; note = cytidine-3'-phosphate
  modified_base 2: mod_base = OTHER; note = uridine-3'-phosphate
  modified_base 3: mod_base = OTHER; note = guanosine-3'-phosphate
  modified_base 4: mod_base = OTHER; note = cytidine-3'-phosphate
  modified_base 5: mod_base = OTHER; note = adenosine-3'-phosphate
  modified_base 6: mod_base = OTHER; note = adenosine-3'-phosphate
  modified_base 7: mod_base = OTHER; note = cytidine-3'-phosphate
  modified_base 8: mod_base = OTHER; note = guanosine-3'-phosphate
  modified_base 9: mod_base = OTHER; note = adenosine-3'-phosphate
  modified_base 10: mod_base = OTHER; note = cytidine-3'-phosphate
  modified_base 11: mod_base = OTHER; note = guanosine-3'-phosphate
  modified_base 12: mod_base = OTHER; note = cytidine-3'-phosphate
  modified_base 13: mod_base = OTHER; note = guanosine-3'-phosphate
  modified_base 14: mod_base = OTHER; note = uridine-3'-phosphate
  modified_base 15: mod_base = OTHER; note = cytidine-3'-phosphate
  modified_base 16: mod_base = OTHER; note = cytidine-3'-phosphate
  modified_base 17: mod_base = OTHER; note = cytidine-3'-phosphate
  modified_base 18: mod_base = OTHER; note = guanosine-3'-phosphate
  modified_base 19: mod_base = OTHER; note = guanosine-3'-phosphate
  misc_feature 1..19: note = RNA
  misc_feature 20..21: note = DNA
ctgcaacgacgcgtcccggtt

SEQ ID NO: 25 - DNA, 21 bp, synthetic construct
  source 1..21: mol_type = other DNA
  modified_base 1: mod_base = OTHER; note = guanosine-3'-phosphate
  modified_base 2: mod_base = OTHER; note = guanosine-3'-phosphate
  modified_base 3: mod_base = OTHER; note = adenosine-3'-phosphate
  modified_base 4: mod_base = OTHER; note = cytidine-3'-phosphate
  modified_base 5: mod_base = OTHER; note = guanosine-3'-phosphate
  modified_base 6: mod_base = OTHER; note = cytidine-3'-phosphate
  modified_base 7: mod_base = OTHER; note = guanosine-3'-phosphate
  modified_base 8: mod_base = OTHER; note = uridine-3'-phosphate
  modified_base 9: mod_base = OTHER; note = cytidine-3'-phosphate
  modified_base 10: mod_base = OTHER; note = guanosine-3'-phosphate
  modified_base 11: mod_base = OTHER; note = uridine-3'-phosphate
  modified_base 12: mod_base = OTHER; note = uridine-3'-phosphate
  modified_base 13: mod_base = OTHER; note = guanosine-3'-phosphate
  modified_base 14: mod_base = OTHER; note = cytidine-3'-phosphate
  modified_base 15: mod_base = OTHER; note = adenosine-3'-phosphate
  modified_base 16: mod_base = OTHER; note = guanosine-3'-phosphate
  modified_base 17: mod_base = OTHER; note = cytidine-3'-phosphate
  modified_base 18: mod_base = OTHER; note = adenosine-3'-phosphate
  modified_base 19: mod_base = OTHER; note = guanosine-3'-phosphate
  misc_feature 1..19: note = RNA
  misc_feature 20..21: note = DNA
ggacgcgtcgttgcagcagtt

SEQ ID NO: 26 - DNA, 21 bp, synthetic construct
  source 1..21: mol_type = other DNA
  modified_base 1: mod_base = OTHER; note = cytidine-3'-phosphate
  modified_base 2: mod_base = OTHER; note = uridine-3'-phosphate
  modified_base 3: mod_base = OTHER; note = guanosine-3'-phosphate
  modified_base 4: mod_base = OTHER; note = cytidine-3'-phosphate
  modified_base 5: mod_base = OTHER; note = uridine-3'-phosphate
  modified_base 6: mod_base = OTHER; note = guanosine-3'-phosphate
  modified_base 7: mod_base = OTHER; note = cytidine-3'-phosphate
  modified_base 8: mod_base = OTHER; note = adenosine-3'-phosphate
  modified_base 9: mod_base = OTHER; note = adenosine-3'-phosphate
  modified_base 10: mod_base = OTHER; note = cytidine-3'-phosphate
  modified_base 11: mod_base = OTHER; note = guanosine-3'-phosphate
  modified_base 12: mod_base = OTHER; note = adenosine-3'-phosphate
  modified_base 13: mod_base = OTHER; note = cytidine-3'-phosphate
  modified_base 14: mod_base = OTHER; note = guanosine-3'-phosphate
  modified_base 15: mod_base = OTHER; note = cytidine-3'-phosphate
  modified_base 16: mod_base = OTHER; note = guanosine-3'-phosphate
  modified_base 17: mod_base = OTHER; note = uridine-3'-phosphate
  modified_base 18: mod_base = OTHER; note = cytidine-3'-phosphate
  modified_base 19: mod_base = OTHER; note = cytidine-3'-phosphate
  misc_feature 1..19: note = RNA
  misc_feature 20..21: note = DNA
ctgctgcaacgacgcgtcctt

SEQ ID NO: 27 - DNA, 21 bp, synthetic construct
  source 1..21: mol_type = other DNA
  modified_base 1: mod_base = OTHER; note = uridine-3'-phosphate
  modified_base 2: mod_base = OTHER; note = cytidine-3'-phosphate
  modified_base 3: mod_base = OTHER; note = cytidine-3'-phosphate
  modified_base 4: mod_base = OTHER; note = cytidine-3'-phosphate
  modified_base 5: mod_base = OTHER; note = adenosine-3'-phosphate
  modified_base 6: mod_base = OTHER; note = guanosine-3'-phosphate
  modified_base 7: mod_base = OTHER; note = cytidine-3'-phosphate
  modified_base 8: mod_base = OTHER; note = cytidine-3'-phosphate
  modified_base 9: mod_base = OTHER; note = adenosine-3'-phosphate
  modified_base 10: mod_base = OTHER; note = guanosine-3'-phosphate
  modified_base 11: mod_base = OTHER; note = guanosine-3'-phosphate
  modified_base 12: mod_base = OTHER; note = adenosine-3'-phosphate
  modified_base 13: mod_base = OTHER; note = uridine-3'-phosphate
  modified_base 14: mod_base = OTHER; note = uridine-3'-phosphate
  modified_base 15: mod_base = OTHER; note = cytidine-3'-phosphate
  modified_base 16: mod_base = OTHER; note = cytidine-3'-phosphate
  modified_base 17: mod_base = OTHER; note = guanosine-3'-phosphate
  modified_base 18: mod_base = OTHER; note = cytidine-3'-phosphate
  modified_base 19: mod_base = OTHER; note = guanosine-3'-phosphate
  modified_base 20: mod_base = OTHER; note = 2'-deoxythymidine-3'-phosphorothioate
  misc_feature 1..19: note = RNA
  misc_feature 20..21: note = DNA
tcccagccaggattccgcgtt

SEQ ID NO: 28 - DNA, 21 bp, synthetic construct
  source 1..21: mol_type = other DNA
  modified_base 1: mod_base = OTHER; note = cytidine-3'-phosphate
  modified_base 2: mod_base = OTHER; note = guanosine-3'-phosphate
  modified_base 3: mod_base = OTHER; note = cytidine-3'-phosphate
  modified_base 4: mod_base = OTHER; note = guanosine-3'-phosphate
  modified_base 5: mod_base = OTHER; note = guanosine-3'-phosphate
  modified_base 6: mod_base = OTHER; note = adenosine-3'-phosphate
  modified_base 7: mod_base = OTHER; note = adenosine-3'-phosphate
  modified_base 8: mod_base = OTHER; note = uridine-3'-phosphate
  modified_base 9: mod_base = OTHER; note = cytidine-3'-phosphate
  modified_base 10: mod_base = OTHER; note = cytidine-3'-phosphate
  modified_base 11: mod_base = OTHER; note = uridine-3'-phosphate
  modified_base 12: mod_base = OTHER; note = guanosine-3'-phosphate
  modified_base 13: mod_base = OTHER; note = guanosine-3'-phosphate
  modified_base 14: mod_base = OTHER; note = cytidine-3'-phosphate
  modified_base 15: mod_base = OTHER; note = uridine-3'-phosphate
  modified_base 16: mod_base = OTHER; note = guanosine-3'-phosphate
  modified_base 17: mod_base = OTHER; note = guanosine-3'-phosphate
  modified_base 18: mod_base = OTHER; note = guanosine-3'-phosphate
  modified_base 19: mod_base = OTHER; note = adenosine-3'-phosphate
  modified_base 20: mod_base = OTHER; note = 2'-deoxythymidine-3'-phosphorothioate
  misc_feature 1..19: note = RNA
  misc_feature 20..21: note = DNA
cgcggaatcctggctgggatt

SEQ ID NO: 29 - DNA, 21 bp, synthetic construct
  source 1..21: mol_type = other DNA
  modified_base 1: mod_base = OTHER; note = 2'-O-methyluridine-3'-phosphate
  modified_base 2: mod_base = OTHER; note = 2'-O-methylcytidine-3'-phosphate
  modified_base 3: mod_base = OTHER; note = 2'-O-methylcytidine-3'-phosphate
  modified_base 4: mod_base = OTHER; note = 2'-O-methylcytidine-3'-phosphate
  modified_base 5: mod_base = OTHER; note = adenosine-3'-phosphate
  modified_base 6: mod_base = OTHER; note = guanosine-3'-phosphate
  modified_base 7: mod_base = OTHER; note = 2'-O-methylcytidine-3'-phosphate
  modified_base 8: mod_base = OTHER; note = 2'-O-methylcytidine-3'-phosphate
  modified_base 9: mod_base = OTHER; note = adenosine-3'-phosphate
  modified_base 10: mod_base = OTHER; note = guanosine-3'-phosphate
  modified_base 11: mod_base = OTHER; note = guanosine-3'-phosphate
  modified_base 12: mod_base = OTHER; note = adenosine-3'-phosphate
  modified_base 13: mod_base = OTHER; note = 2'-O-methyluridine-3'-phosphate
  modified_base 14: mod_base = OTHER; note = 2'-O-methyluridine-3'-phosphate
  modified_base 15: mod_base = OTHER; note = 2'-O-methylcytidine-3'-phosphate
  modified_base 16: mod_base = OTHER; note = 2'-O-methylcytidine-3'-phosphate
  modified_base 17: mod_base = OTHER; note = guanosine-3'-phosphate
  modified_base 18: mod_base = OTHER; note = 2'-O-methylcytidine-3'-phosphate
  modified_base 19: mod_base = OTHER; note = guanosine-3'-phosphate
  modified_base 20: mod_base = OTHER; note = 2'-deoxythymidine-3'-phosphorothioate
  misc_feature 1..19: note = RNA
  misc_feature 20..21: note = DNA
tcccagccaggattccgcgtt

SEQ ID NO: 30 - DNA, 21 bp, synthetic construct
  source 1..21: mol_type = other DNA
  modified_base 1: mod_base = OTHER; note = cytidine-3'-phosphate
  modified_base 2: mod_base = OTHER; note = guanosine-3'-phosphate
  modified_base 3: mod_base = OTHER; note = cytidine-3'-phosphate
  modified_base 4: mod_base = OTHER; note = guanosine-3'-phosphate
  modified_base 5: mod_base = OTHER; note = guanosine-3'-phosphate
  modified_base 6: mod_base = OTHER; note = adenosine-3'-phosphate
  modified_base 7: mod_base = OTHER; note = adenosine-3'-phosphate
  modified_base 8: mod_base = OTHER; note = uridine-3'-phosphate
  modified_base 9: mod_base = OTHER; note = cytidine-3'-phosphate
  modified_base 10: mod_base = OTHER; note = cytidine-3'-phosphate
  modified_base 11: mod_base = OTHER; note = uridine-3'-phosphate
  modified_base 12: mod_base = OTHER; note = guanosine-3'-phosphate
  modified_base 13: mod_base = OTHER; note = guanosine-3'-phosphate
  modified_base 14: mod_base = OTHER; note = cytidine-3'-phosphate
  modified_base 15: mod_base = OTHER; note = uridine-3'-phosphate
  modified_base 16: mod_base = OTHER; note = guanosine-3'-phosphate
  modified_base 17: mod_base = OTHER; note = guanosine-3'-phosphate
  modified_base 18: mod_base = OTHER; note = guanosine-3'-phosphate
  modified_base 19: mod_base = OTHER; note = adenosine-3'-phosphate
  modified_base 20: mod_base = OTHER; note = 2'-deoxythymidine-3'-phosphorothioate
  misc_feature 1..19: note = RNA
  misc_feature 20..21: note = DNA
cgcggaatcctggctgggatt

SEQ ID NO: 31 - DNA, 21 bp, synthetic construct
  source 1..21: mol_type = other DNA
  modified_base 1: mod_base = OTHER; note = cytidine-3'-phosphate
  modified_base 2: mod_base = OTHER; note = cytidine-3'-phosphate
  modified_base 3: mod_base = OTHER; note = cytidine-3'-phosphate
  modified_base 4: mod_base = OTHER; note = adenosine-3'-phosphate
  modified_base 5: mod_base = OTHER; note = guanosine-3'-phosphate
  modified_base 6: mod_base = OTHER; note = cytidine-3'-phosphate
  modified_base 7: mod_base = OTHER; note = cytidine-3'-phosphate
  modified_base 8: mod_base = OTHER; note = adenosine-3'-phosphate
  modified_base 9: mod_base = OTHER; note = guanosine-3'-phosphate
  modified_base 10: mod_base = OTHER; note = guanosine-3'-phosphate
  modified_base 11: mod_base = OTHER; note = adenosine-3'-phosphate
  modified_base 12: mod_base = OTHER; note = uridine-3'-phosphate
  modified_base 13: mod_base = OTHER; note = uridine-3'-phosphate
  modified_base 14: mod_base = OTHER; note = cytidine-3'-phosphate
  modified_base 15: mod_base = OTHER; note = cytidine-3'-phosphate
  modified_base 16: mod_base = OTHER; note = guanosine-3'-phosphate
  modified_base 17: mod_base = OTHER; note = cytidine-3'-phosphate
  modified_base 18: mod_base = OTHER; note = guanosine-3'-phosphate
  modified_base 19: mod_base = OTHER; note = cytidine-3'-phosphate
  modified_base 20: mod_base = OTHER; note = 2'-deoxythymidine-3'-phosphorothioate
  misc_feature 1..19: note = RNA
  misc_feature 20..21: note = DNA
cccagccaggattccgcgctt

SEQ ID NO: 32 - DNA, 21 bp, synthetic construct
  source 1..21: mol_type = other DNA
  modified_base 1: mod_base = OTHER; note = guanosine-3'-phosphate
  modified_base 2: mod_base = OTHER; note = cytidine-3'-phosphate
  modified_base 3: mod_base = OTHER; note = guanosine-3'-phosphate
  modified_base 4: mod_base = OTHER; note = cytidine-3'-phosphate
  modified_base 5: mod_base = OTHER; note = guanosine-3'-phosphate
  modified_base 6: mod_base = OTHER; note = guanosine-3'-phosphate
  modified_base 7: mod_base = OTHER; note = adenosine-3'-phosphate
  modified_base 8: mod_base = OTHER; note = adenosine-3'-phosphate
  modified_base 9: mod_base = OTHER; note = uridine-3'-phosphate
  modified_base 10: mod_base = OTHER; note = cytidine-3'-phosphate
  modified_base 11: mod_base = OTHER; note = cytidine-3'-phosphate
  modified_base 12: mod_base = OTHER; note = uridine-3'-phosphate
  modified_base 13: mod_base = OTHER; note = guanosine-3'-phosphate
  modified_base 14: mod_base = OTHER; note = guanosine-3'-phosphate
  modified_base 15: mod_base = OTHER; note = cytidine-3'-phosphate
  modified_base 16: mod_base = OTHER; note = uridine-3'-phosphate
  modified_base 17: mod_base = OTHER; note = guanosine-3'-phosphate
  modified_base 18: mod_base = OTHER; note = guanosine-3'-phosphate
  modified_base 19: mod_base = OTHER; note = guanosine-3'-phosphate
  modified_base 20: mod_base = OTHER; note = 2'-deoxythymidine-3'-phosphorothioate
  misc_feature 1..19: note = RNA
  misc_feature 20..21: note = DNA
gcgcggaatcctggctgggtt

SEQ ID NO: 33 - DNA, 21 bp, synthetic construct
  source 1..21: mol_type = other DNA
  modified_base 1: mod_base = OTHER; note = 2'-O-methylcytidine-3'-phosphate
  modified_base 2: mod_base = OTHER; note = 2'-O-methylcytidine-3'-phosphate
  modified_base 3: mod_base = OTHER; note = 2'-O-methylcytidine-3'-phosphate
  modified_base 4: mod_base = OTHER; note = adenosine-3'-phosphate
  modified_base 5: mod_base = OTHER; note = guanosine-3'-phosphate
  modified_base 6: mod_base = OTHER; note = 2'-O-methylcytidine-3'-phosphate
  modified_base 7: mod_base = OTHER; note = 2'-O-methylcytidine-3'-phosphate
  modified_base 8: mod_base = OTHER; note = adenosine-3'-phosphate
  modified_base 9: mod_base = OTHER; note = guanosine-3'-phosphate
  modified_base 10: mod_base = OTHER; note = guanosine-3'-phosphate
  modified_base 11: mod_base = OTHER; note = adenosine-3'-phosphate
  modified_base 12: mod_base = OTHER; note = 2'-O-methyluridine-3'-phosphate
  modified_base 13: mod_base = OTHER; note = 2'-O-methyluridine-3'-phosphate
  modified_base 14: mod_base = OTHER; note = 2'-O-methylcytidine-3'-phosphate
  modified_base 15: mod_base = OTHER; note = 2'-O-methylcytidine-3'-phosphate
  modified_base 16: mod_base = OTHER; note = guanosine-3'-phosphate
  modified_base 17: mod_base = OTHER; note = 2'-O-methylcytidine-3'-phosphate
  modified_base 18: mod_base = OTHER; note = guanosine-3'-phosphate
  modified_base 19: mod_base = OTHER; note = 2'-O-methylcytidine-3'-phosphate
  modified_base 20: mod_base = OTHER; note = 2'-deoxythymidine-3'-phosphorothioate
  misc_feature 1..19: note = RNA
  misc_feature 20..21: note = DNA
cccagccaggattccgcgctt

SEQ ID NO: 34 - DNA, 21 bp, synthetic construct
  source 1..21: mol_type = other DNA
  modified_base 1: mod_base = OTHER; note = guanosine-3'-phosphate
  modified_base 2: mod_base = OTHER; note = cytidine-3'-phosphate
  modified_base 3: mod_base = OTHER; note = guanosine-3'-phosphate
  modified_base 4: mod_base = OTHER; note = cytidine-3'-phosphate
  modified_base 5: mod_base = OTHER; note = guanosine-3'-phosphate
  modified_base 6: mod_base = OTHER; note = guanosine-3'-phosphate
  modified_base 7: mod_base = OTHER; note = adenosine-3'-phosphate
  modified_base 8: mod_base = OTHER; note = adenosine-3'-phosphate
  modified_base 9: mod_base = OTHER; note = uridine-3'-phosphate
  modified_base 10: mod_base = OTHER; note = cytidine-3'-phosphate
  modified_base 11: mod_base = OTHER; note = cytidine-3'-phosphate
  modified_base 12: mod_base = OTHER; note = uridine-3'-phosphate
  modified_base 13: mod_base = OTHER; note = guanosine-3'-phosphate
  modified_base 14: mod_base = OTHER; note = guanosine-3'-phosphate
  modified_base 15: mod_base = OTHER; note = cytidine-3'-phosphate
  modified_base 16: mod_base = OTHER; note = uridine-3'-phosphate
  modified_base 17: mod_base = OTHER; note = guanosine-3'-phosphate
  modified_base 18: mod_base = OTHER; note = guanosine-3'-phosphate
  modified_base 19: mod_base = OTHER; note = guanosine-3'-phosphate
  modified_base 20: mod_base = OTHER; note = 2'-deoxythymidine-3'-phosphorothioate
  misc_feature 1..19: note = RNA
  misc_feature 20..21: note = DNA
gcgcggaatcctggctgggtt

SEQ ID NO: 35 - DNA, 21 bp, synthetic construct
  source 1..21: mol_type = other DNA
  modified_base 1: mod_base = OTHER; note = cytidine-3'-phosphate
  modified_base 2: mod_base = OTHER; note = adenosine-3'-phosphate
  modified_base 3: mod_base = OTHER; note = guanosine-3'-phosphate
  modified_base 4: mod_base = OTHER; note = cytidine-3'-phosphate
  modified_base 5: mod_base = OTHER; note = cytidine-3'-phosphate
  modified_base 6: mod_base = OTHER; note = adenosine-3'-phosphate
  modified_base 7: mod_base = OTHER; note = guanosine-3'-phosphate
  modified_base 8: mod_base = OTHER; note = guanosine-3'-phosphate
  modified_base 9: mod_base = OTHER; note = adenosine-3'-phosphate
  modified_base 10: mod_base = OTHER; note = uridine-3'-phosphate
  modified_base 11: mod_base = OTHER; note = uridine-3'-phosphate
  modified_base 12: mod_base = OTHER; note = cytidine-3'-phosphate
  modified_base 13: mod_base = OTHER; note = cytidine-3'-phosphate
  modified_base 14: mod_base = OTHER; note = guanosine-3'-phosphate
  modified_base 15: mod_base = OTHER; note = cytidine-3'-phosphate
  modified_base 16: mod_base = OTHER; note = guanosine-3'-phosphate
  modified_base 17: mod_base = OTHER; note = cytidine-3'-phosphate
  modified_base 18: mod_base = OTHER; note = guanosine-3'-phosphate
  modified_base 19: mod_base = OTHER; note = cytidine-3'-phosphate
  modified_base 20: mod_base = OTHER; note = 2'-deoxythymidine-3'-phosphorothioate
  misc_feature 1..19: note = RNA
  misc_feature 20..21: note = DNA
cagccaggattccgcgcgctt

SEQ ID NO: 36 - DNA, 21 bp, synthetic construct
  source 1..21: mol_type = other DNA
  modified_base 1: mod_base = OTHER; note = guanosine-3'-phosphate
  modified_base 2: mod_base = OTHER; note = cytidine-3'-phosphate
  modified_base 3: mod_base = OTHER; note = guanosine-3'-phosphate
  modified_base 4: mod_base = OTHER; note = cytidine-3'-phosphate
  modified_base 5: mod_base = OTHER; note = guanosine-3'-phosphate
  modified_base 6: mod_base = OTHER; note = cytidine-3'-phosphate
  modified_base 7: mod_base = OTHER; note = guanosine-3'-phosphate
  modified_base 8: mod_base = OTHER; note = guanosine-3'-phosphate
  modified_base 9: mod_base = OTHER; note = adenosine-3'-phosphate
  modified_base 10: mod_base = OTHER; note = adenosine-3'-phosphate
  modified_base 11: mod_base = OTHER; note = uridine-3'-phosphate
  modified_base 12: mod_base = OTHER; note = cytidine-3'-phosphate
  modified_base 13: mod_base = OTHER; note = cytidine-3'-phosphate
  modified_base 14: mod_base = OTHER; note = uridine-3'-phosphate
  modified_base 15: mod_base = OTHER; note = guanosine-3'-phosphate
  modified_base 16: mod_base = OTHER; note = guanosine-3'-phosphate
  modified_base 17: mod_base = OTHER; note = cytidine-3'-phosphate
  modified_base 18: mod_base = OTHER; note = uridine-3'-phosphate
  modified_base 19: mod_base = OTHER; note = guanosine-3'-phosphate
  modified_base 20: mod_base = OTHER; note = 2'-deoxythymidine-3'-phosphorothioate
  misc_feature 1..19: note = RNA
  misc_feature 20..21: note = DNA
gcgcgcggaatcctggctgtt

SEQ ID NO: 37 - DNA, 21 bp, synthetic construct
  source 1..21: mol_type = other DNA
  modified_base 1: mod_base = OTHER; note = 2'-O-methylcytidine-3'-phosphate
  modified_base 2: mod_base = OTHER; note = adenosine-3'-phosphate
  modified_base 3: mod_base = OTHER; note = guanosine-3'-phosphate
  modified_base 4: mod_base = OTHER; note = 2'-O-methylcytidine-3'-phosphate
  modified_base 5: mod_base = OTHER; note = 2'-O-methylcytidine-3'-phosphate
  modified_base 6: mod_base = OTHER; note = adenosine-3'-phosphate
  modified_base 7: mod_base = OTHER; note = guanosine-3'-phosphate
  modified_base 8: mod_base = OTHER; note = guanosine-3'-phosphate
  modified_base 9: mod_base = OTHER; note = adenosine-3'-phosphate
  modified_base 10: mod_base = OTHER; note = 2'-O-methyluridine-3'-phosphate
  modified_base 11: mod_base = OTHER; note = 2'-O-methyluridine-3'-phosphate
  modified_base 12: mod_base = OTHER; note = 2'-O-methylcytidine-3'-phosphate
  modified_base 13: mod_base = OTHER; note = 2'-O-methylcytidine-3'-phosphate
  modified_base 14: mod_base = OTHER; note = guanosine-3'-phosphate
  modified_base 15: mod_base = OTHER; note = 2'-O-methylcytidine-3'-phosphate
  modified_base 16: mod_base = OTHER; note = guanosine-3'-phosphate
  modified_base 17: mod_base = OTHER; note = 2'-O-methylcytidine-3'-phosphate
  modified_base 18: mod_base = OTHER; note = guanosine-3'-phosphate
  modified_base 19: mod_base = OTHER; note = 2'-O-methylcytidine-3'-phosphate
  modified_base 20: mod_base = OTHER; note = 2'-deoxythymidine-3'-phosphorothioate
  misc_feature 1..19: note = RNA
  misc_feature 20..21: note = DNA
cagccaggattccgcgcgctt

SEQ ID NO: 38 - DNA, 21 bp, synthetic construct
  source 1..21: mol_type = other DNA
  modified_base 1: mod_base = OTHER; note = guanosine-3'-phosphate
  modified_base 2: mod_base = OTHER; note = cytidine-3'-phosphate
  modified_base 3: mod_base = OTHER; note = guanosine-3'-phosphate
  modified_base 4: mod_base = OTHER; note = cytidine-3'-phosphate
  modified_base 5: mod_base = OTHER; note = guanosine-3'-phosphate
  modified_base 6: mod_base = OTHER; note = cytidine-3'-phosphate
  modified_base 7: mod_base = OTHER; note = guanosine-3'-phosphate
  modified_base 8: mod_base = OTHER; note = guanosine-3'-phosphate
  modified_base 9: mod_base = OTHER; note = adenosine-3'-phosphate
  modified_base 10: mod_base = OTHER; note = adenosine-3'-phosphate
  modified_base 11: mod_base = OTHER; note = uridine-3'-phosphate
  modified_base 12: mod_base = OTHER; note = cytidine-3'-phosphate
  modified_base 13: mod_base = OTHER; note = cytidine-3'-phosphate
  modified_base 14: mod_base = OTHER; note = uridine-3'-phosphate
  modified_base 15: mod_base = OTHER; note = guanosine-3'-phosphate
  modified_base 16: mod_base = OTHER; note = guanosine-3'-phosphate
  modified_base 17: mod_base = OTHER; note = cytidine-3'-phosphate
  modified_base 18: mod_base = OTHER; note = uridine-3'-phosphate
  modified_base 19: mod_base = OTHER; note = guanosine-3'-phosphate
  modified_base 20: mod_base = OTHER; note = 2'-deoxythymidine-3'-phosphorothioate
  misc_feature 1..19: note = RNA
  misc_feature 20..21: note = DNA
gcgcgcggaatcctggctgtt

SEQ ID NO: 39 - DNA, 21 bp, synthetic construct
  source 1..21: mol_type = other DNA
  modified_base 1: mod_base = OTHER; note = adenosine-3'-phosphate
  modified_base 2: mod_base = OTHER; note = guanosine-3'-phosphate
  modified_base 3: mod_base = OTHER; note = cytidine-3'-phosphate
  modified_base 4: mod_base = OTHER; note = uridine-3'-phosphate
  modified_base 5: mod_base = OTHER; note = cytidine-3'-phosphate
  modified_base 6: mod_base = OTHER; note = cytidine-3'-phosphate
  modified_base 7: mod_base = OTHER; note = uridine-3'-phosphate
  modified_base 8: mod_base = OTHER; note = guanosine-3'-phosphate
  modified_base 9: mod_base = OTHER; note = cytidine-3'-phosphate
  modified_base 10: mod_base = OTHER; note = adenosine-3'-phosphate
  modified_base 11: mod_base = OTHER; note = cytidine-3'-phosphate
  modified_base 12: mod_base = OTHER; note = adenosine-3'-phosphate
  modified_base 13: mod_base = OTHER; note = guanosine-3'-phosphate
  modified_base 14: mod_base = OTHER; note = uridine-3'-phosphate
  modified_base 15: mod_base = OTHER; note = cytidine-3'-phosphate
  modified_base 16: mod_base = OTHER; note = cytidine-3'-phosphate
  modified_base 17: mod_base = OTHER; note = uridine-3'-phosphate
  modified_base 18: mod_base = OTHER; note = cytidine-3'-phosphate
  modified_base 19: mod_base = OTHER; note = cytidine-3'-phosphate
  modified_base 20: mod_base = OTHER; note = 2'-deoxythymidine-3'-phosphorothioate
  misc_feature 1..19: note = RNA
  misc_feature 20..21: note = DNA
agctcctgcacagtcctcctt

SEQ ID NO: 40 - DNA, 21 bp, synthetic construct
  source 1..21: mol_type = other DNA
  modified_base 1: mod_base = OTHER; note = guanosine-3'-phosphate
  modified_base 2: mod_base = OTHER; note = guanosine-3'-phosphate
  modified_base 3: mod_base = OTHER; note = adenosine-3'-phosphate
  modified_base 4: mod_base = OTHER; note = guanosine-3'-phosphate
  modified_base 5: mod_base = OTHER; note = guanosine-3'-phosphate
  modified_base 6: mod_base = OTHER; note = adenosine-3'-phosphate
  modified_base 7: mod_base = OTHER; note = cytidine-3'-phosphate
  modified_base 8: mod_base = OTHER; note = uridine-3'-phosphate
  modified_base 9: mod_base = OTHER; note = guanosine-3'-phosphate
  modified_base 10: mod_base = OTHER; note = uridine-3'-phosphate
  modified_base 11: mod_base = OTHER; note = guanosine-3'-phosphate
  modified_base 12: mod_base = OTHER; note = cytidine-3'-phosphate
  modified_base 13: mod_base = OTHER; note = adenosine-3'-phosphate
  modified_base 14: mod_base = OTHER; note = guanosine-3'-phosphate
  modified_base 15: mod_base = OTHER; note = guanosine-3'-phosphate
  modified_base 16: mod_base = OTHER; note = adenosine-3'-phosphate
  modified_base 17: mod_base = OTHER; note = guanosine-3'-phosphate
  modified_base 18: mod_base = OTHER; note = cytidine-3'-phosphate
  modified_base 19: mod_base = OTHER; note = uridine-3'-phosphate
  modified_base 20: mod_base = OTHER; note = 2'-deoxythymidine-3'-phosphorothioate
  misc_feature 1..19: note = RNA
  misc_feature 20..21: note = DNA
ggaggactgtgcaggagcttt

SEQ ID NO: 41 - DNA, 21 bp, synthetic construct
  source 1..21: mol_type = other DNA
  modified_base 1: mod_base = OTHER; note = adenosine-3'-phosphate
  modified_base 2: mod_base = OTHER; note = guanosine-3'-phosphate
  modified_base 3: mod_base = OTHER; note = 2'-O-methylcytidine-3'-phosphate
  modified_base 4: mod_base = OTHER; note = 2'-O-methyluridine-3'-phosphate
  modified_base 5: mod_base = OTHER; note = 2'-O-methylcytidine-3'-phosphate
  modified_base 6: mod_base = OTHER; note = 2'-O-methylcytidine-3'-phosphate
  modified_base 7: mod_base = OTHER; note = 2'-O-methyluridine-3'-phosphate
  modified_base 8: mod_base = OTHER; note = guanosine-3'-phosphate
  modified_base 9: mod_base = OTHER; note = 2'-O-methylcytidine-3'-phosphate
  modified_base 10: mod_base = OTHER; note = adenosine-3'-phosphate
  modified_base 11: mod_base = OTHER; note = 2'-O-methylcytidine-3'-phosphate
  modified_base 12: mod_base = OTHER; note = adenosine-3'-phosphate
  modified_base 13: mod_base = OTHER; note = guanosine-3'-phosphate
  modified_base 14: mod_base = OTHER; note = 2'-O-methyluridine-3'-phosphate
  modified_base 15: mod_base = OTHER; note = 2'-O-methylcytidine-3'-phosphate
  modified_base 16: mod_base = OTHER; note = 2'-O-methylcytidine-3'-phosphate
  modified_base 17: mod_base = OTHER; note = 2'-O-methyluridine-3'-phosphate
  modified_base 18: mod_base = OTHER; note = 2'-O-methylcytidine-3'-phosphate
  modified_base 19: mod_base = OTHER; note = 2'-O-methylcytidine-3'-phosphate
  modified_base 20: mod_base = OTHER; note = 2'-deoxythymidine-3'-phosphorothioate
  misc_feature 1..19: note = RNA
  misc_feature 20..21: note = DNA
agctcctgcacagtcctcctt

SEQ ID NO: 42 - DNA, 21 bp, synthetic construct
  source 1..21: mol_type = other DNA
  modified_base 1: mod_base = OTHER; note = guanosine-3'-phosphate
  modified_base 2: mod_base = OTHER; note = guanosine-3'-phosphate
  modified_base 3: mod_base = OTHER; note = adenosine-3'-phosphate
  modified_base 4: mod_base = OTHER; note = guanosine-3'-phosphate
  modified_base 5: mod_base = OTHER; note = guanosine-3'-phosphate
  modified_base 6: mod_base = OTHER; note = adenosine-3'-phosphate
  modified_base 7: mod_base = OTHER; note = cytidine-3'-phosphate
  modified_base 8: mod_base = OTHER; note = uridine-3'-phosphate
  modified_base 9: mod_base = OTHER; note = guanosine-3'-phosphate
  modified_base 10: mod_base = OTHER; note = uridine-3'-phosphate
  modified_base 11: mod_base = OTHER; note = guanosine-3'-phosphate
  modified_base 12: mod_base = OTHER; note = 2'-O-methylcytidine-3'-phosphate
  modified_base 13: mod_base = OTHER; note = adenosine-3'-phosphate
  modified_base 14: mod_base = OTHER; note = guanosine-3'-phosphate
  modified_base 15: mod_base = OTHER; note = guanosine-3'-phosphate
  modified_base 16: mod_base = OTHER; note = adenosine-3'-phosphate
  modified_base 17: mod_base = OTHER; note = guanosine-3'-phosphate
  modified_base 18: mod_base = OTHER; note = cytidine-3'-phosphate
  modified_base 19: mod_base = OTHER; note = uridine-3'-phosphate
  modified_base 20: mod_base = OTHER; note = 2'-deoxythymidine-3'-phosphorothioate
  misc_feature 1..19: note = RNA
  misc_feature 20..21: note = DNA
ggaggactgtgcaggagcttt

SEQ ID NO: 43 - DNA, 21 bp, synthetic construct
  source 1..21: mol_type = other DNA
  modified_base 1: mod_base = OTHER; note = cytidine-3'-phosphate
  modified_base 2: mod_base = OTHER; note = adenosine-3'-phosphate
  modified_base 3: mod_base = OTHER; note = cytidine-3'-phosphate
  modified_base 4: mod_base = OTHER; note = cytidine-3'-phosphate
  modified_base 5: mod_base = OTHER; note = guanosine-3'-phosphate
  modified_base 6: mod_base = OTHER; note = cytidine-3'-phosphate
  modified_base 7: mod_base = OTHER; note = adenosine-3'-phosphate
  modified_base 8: mod_base = OTHER; note = adenosine-3'-phosphate
  modified_base 9: mod_base = OTHER; note = guanosine-3'-phosphate
  modified_base 10: mod_base = OTHER; note = guanosine-3'-phosphate
  modified_base 11: mod_base = OTHER; note = cytidine-3'-phosphate
  modified_base 12: mod_base = OTHER; note = uridine-3'-phosphate
  modified_base 13: mod_base = OTHER; note = cytidine-3'-phosphate
  modified_base 14: mod_base = OTHER; note = adenosine-3'-phosphate
  modified_base 15: mod_base = OTHER; note = adenosine-3'-phosphate
  modified_base 16: mod_base = OTHER; note = guanosine-3'-phosphate
  modified_base 17: mod_base = OTHER; note = guanosine-3'-phosphate
  modified_base 18: mod_base = OTHER; note = cytidine-3'-phosphate
  modified_base 19: mod_base = OTHER; note = guanosine-3'-phosphate
  misc_feature 1..19: note = RNA
  misc_feature 20..21: note = DNA
caccgcaaggctcaaggcgtt

SEQ ID NO: 44 - DNA, 21 bp, synthetic construct
  source 1..21: mol_type = other DNA
  modified_base 1: mod_base = OTHER; note = cytidine-3'-phosphate
  modified_base 2: mod_base = OTHER; note = guanosine-3'-phosphate
  modified_base 3: mod_base = OTHER; note = cytidine-3'-phosphate
  modified_base 4: mod_base = OTHER; note = cytidine-3'-phosphate
  modified_base 5: mod_base = OTHER; note = uridine-3'-phosphate
  modified_base 6: mod_base = OTHER; note = uridine-3'-phosphate
  modified_base 7: mod_base = OTHER; note = guanosine-3'-phosphate
  modified_base 8: mod_base = OTHER; note = adenosine-3'-phosphate
  modified_base 9: mod_base = OTHER; note = guanosine-3'-phosphate
  modified_base 10: mod_base = OTHER; note = cytidine-3'-phosphate
  modified_base 11: mod_base = OTHER; note = cytidine-3'-phosphate
  modified_base 12: mod_base = OTHER; note = uridine-3'-phosphate
  modified_base 13: mod_base = OTHER; note = uridine-3'-phosphate
  modified_base 14: mod_base = OTHER; note = guanosine-3'-phosphate
  modified_base 15: mod_base = OTHER; note = cytidine-3'-phosphate
  modified_base 16: mod_base = OTHER; note = guanosine-3'-phosphate
  modified_base 17: mod_base = OTHER; note = guanosine-3'-phosphate
  modified_base 18: mod_base = OTHER; note = uridine-3'-phosphate
  modified_base 19: mod_base = OTHER; note = guanosine-3'-phosphate
  misc_feature 1..19: note = RNA
  misc_feature 20..21: note = DNA
cgccttgagccttgcggtgtt

SEQ ID NO: 45 - DNA, 21 bp, synthetic construct
  source 1..21: mol_type = other DNA
  modified_base 1: mod_base = OTHER; note = cytidine-3'-phosphate
  modified_base 2: mod_base = OTHER; note = guanosine-3'-phosphate
  modified_base 3: mod_base = OTHER; note = cytidine-3'-phosphate
  modified_base 4: mod_base = OTHER; note = adenosine-3'-phosphate
  modified_base 5: mod_base = OTHER; note = adenosine-3'-phosphate
  modified_base 6: mod_base = OTHER; note = guanosine-3'-phosphate
  modified_base 7: mod_base = OTHER; note = guanosine-3'-phosphate
  modified_base 8: mod_base = OTHER; note = cytidine-3'-phosphate
  modified_base 9: mod_base = OTHER; note = uridine-3'-phosphate
  modified_base 10: mod_base = OTHER; note = cytidine-3'-phosphate
  modified_base 11: mod_base = OTHER; note = adenosine-3'-phosphate
  modified_base 12: mod_base = OTHER; note = adenosine-3'-phosphate
  modified_base 13: mod_base = OTHER; note = guanosine-3'-phosphate
  modified_base 14: mod_base = OTHER; note = guanosine-3'-phosphate
  modified_base 15: mod_base = OTHER; note = cytidine-3'-phosphate
  modified_base 16: mod_base = OTHER; note = guanosine-3'-phosphate
  modified_base 17: mod_base = OTHER; note = cytidine-3'-phosphate
  modified_base 18: mod_base = OTHER; note = cytidine-3'-phosphate
  modified_base 19: mod_base = OTHER; note = guanosine-3'-phosphate
  misc_feature 1..19: note = RNA
  misc_feature 20..21: note = DNA
cgcaaggctcaaggcgccgtt

SEQ ID NO: 46 - DNA, 21 bp, synthetic construct
  source 1..21: mol_type = other DNA
  modified_base 1: mod_base = OTHER; note = cytidine-3'-phosphate
  modified_base 2: mod_base = OTHER; note = guanosine-3'-phosphate
  modified_base 3: mod_base = OTHER; note = guanosine-3'-phosphate
  modified_base 4: mod_base = OTHER; note = cytidine-3'-phosphate
  modified_base 5: mod_base = OTHER; note = guanosine-3'-phosphate
  modified_base 6: mod_base = OTHER; note = cytidine-3'-phosphate
  modified_base 7: mod_base = OTHER; note = cytidine-3'-phosphate
  modified_base 8: mod_base = OTHER; note = uridine-3'-phosphate
  modified_base 9: mod_base = OTHER; note = uridine-3'-phosphate
  modified_base 10: mod_base = OTHER; note = guanosine-3'-phosphate
  modified_base 11: mod_base = OTHER; note = adenosine-3'-phosphate
  modified_base 12: mod_base = OTHER; note = guanosine-3'-phosphate
  modified_base 13: mod_base = OTHER; note = cytidine-3'-phosphate
  modified_base 14: mod_base = OTHER; note = cytidine-3'-phosphate
  modified_base 15: mod_base = OTHER; note = uridine-3'-phosphate
  modified_base 16: mod_base = OTHER; note = uridine-3'-phosphate
  modified_base 17: mod_base = OTHER; note = guanosine-3'-phosphate
  modified_base 18: mod_base = OTHER; note = cytidine-3'-phosphate
  modified_base 19: mod_base = OTHER; note = guanosine-3'-phosphate
  misc_feature 1..19: note = RNA
  misc_feature 20..21: note = DNA
cggcgccttgagccttgcgtt

SEQ ID NO: 47 - DNA, 21 bp, synthetic construct
  source 1..21: mol_type = other DNA
  modified_base 1: mod_base = OTHER; note = cytidine-3'-phosphate
  modified_base 2: mod_base = OTHER; note = adenosine-3'-phosphate
  modified_base 3: mod_base = OTHER; note = adenosine-3'-phosphate
  modified_base 4: mod_base = OTHER; note = guanosine-3'-phosphate
  modified_base 5: mod_base = OTHER; note = guanosine-3'-phosphate
  modified_base 6: mod_base = OTHER; note = cytidine-3'-phosphate
  modified_base 7: mod_base = OTHER; note = uridine-3'-phosphate
  modified_base 8: mod_base = OTHER; note = cytidine-3'-phosphate
  modified_base 9: mod_base = OTHER; note = adenosine-3'-phosphate
  modified_base 10: mod_base = OTHER; note = adenosine-3'-phosphate
  modified_base 11: mod_base = OTHER; note = guanosine-3'-phosphate
  modified_base 12: mod_base = OTHER; note = guanosine-3'-phosphate
  modified_base 13: mod_base = OTHER; note = cytidine-3'-phosphate
  modified_base 14: mod_base = OTHER; note = guanosine-3'-phosphate
  modified_base 15: mod_base = OTHER; note = cytidine-3'-phosphate
  modified_base 16: mod_base = OTHER; note = cytidine-3'-phosphate
  modified_base 17: mod_base = OTHER; note = guanosine-3'-phosphate
  modified_base 18: mod_base = OTHER; note = cytidine-3'-phosphate
  modified_base 19: mod_base = OTHER; note = cytidine-3'-phosphate
  misc_feature 1..19: note = RNA
  misc_feature 20..21: note = DNA
caaggctcaaggcgccgcctt

SEQ ID NO: 48 - DNA, 21 bp, synthetic construct
  source 1..21: mol_type = other DNA
  modified_base 1: mod_base = OTHER; note = guanosine-3'-phosphate
  modified_base 2: mod_base = OTHER; note = guanosine-3'-phosphate
  modified_base 3: mod_base = OTHER; note = cytidine-3'-phosphate
  modified_base 4: mod_base = OTHER; note = guanosine-3'-phosphate
  modified_base 5: mod_base = OTHER; note = guanosine-3'-phosphate
  modified_base 6: mod_base = OTHER; note = cytidine-3'-phosphate
  modified_base 7: mod_base = OTHER; note = guanosine-3'-phosphate
  modified_base 8: mod_base = OTHER; note = cytidine-3'-phosphate
  modified_base 9: mod_base = OTHER; note = cytidine-3'-phosphate
  modified_base 10: mod_base = OTHER; note = uridine-3'-phosphate
  modified_base 11: mod_base = OTHER; note = uridine-3'-phosphate
  modified_base 12: mod_base = OTHER; note = guanosine-3'-phosphate
  modified_base 13: mod_base = OTHER; note = adenosine-3'-phosphate
  modified_base 14: mod_base = OTHER; note = guanosine-3'-phosphate
  modified_base 15: mod_base = OTHER; note = cytidine-3'-phosphate
  modified_base 16: mod_base = OTHER; note = cytidine-3'-phosphate
  modified_base 17: mod_base = OTHER; note = uridine-3'-phosphate
  modified_base 18: mod_base = OTHER; note = uridine-3'-phosphate
  modified_base 19: mod_base = OTHER; note = guanosine-3'-phosphate
  misc_feature 1..19: note = RNA
  misc_feature 20..21: note = DNA
ggcggcgccttgagccttgtt

SEQ ID NO: 49 - DNA, 21 bp, synthetic construct
  source 1..21: mol_type = other DNA
  modified_base 1: mod_base = OTHER; note = guanosine-3'-phosphate
  modified_base 2: mod_base = OTHER; note = uridine-3'-phosphate
  modified_base 3: mod_base = OTHER; note = guanosine-3'-phosphate
  modified_base 4: mod_base = OTHER; note = guanosine-3'-phosphate
  modified_base 5: mod_base = OTHER; note = adenosine-3'-phosphate
  modified_base 6: mod_base = OTHER; note = cytidine-3'-phosphate
  modified_base 7: mod_base = OTHER; note = cytidine-3'-phosphate
  modified_base 8: mod_base = OTHER; note = guanosine-3'-phosphate
  modified_base 9: mod_base = OTHER; note = cytidine-3'-phosphate
  modified_base 10: mod_base = OTHER; note = guanosine-3'-phosphate
  modified_base 11: mod_base = OTHER; note = cytidine-3'-phosphate
  modified_base 12: mod_base = OTHER; note = adenosine-3'-phosphate
  modified_base 13: mod_base = OTHER; note = cytidine-3'-phosphate
  modified_base 14: mod_base = OTHER; note = guanosine-3'-phosphate
  modified_base 15: mod_base = OTHER; note = guanosine-3'-phosphate
  modified_base 16: mod_base = OTHER; note = cytidine-3'-phosphate
  modified_base 17: mod_base = OTHER; note = cytidine-3'-phosphate
  modified_base 18: mod_base = OTHER; note = uridine-3'-phosphate
  modified_base 19: mod_base = OTHER; note = cytidine-3'-phosphate
  misc_feature 1..19: note = RNA
  misc_feature 20..21: note = DNA
gtggaccgcgcacggcctctt

SEQ ID NO: 50 - DNA, 21 bp, synthetic construct
  source 1..21: mol_type = other DNA
  modified_base 1: mod_base = OTHER; note = guanosine-3'-phosphate
  modified_base 2: mod_base = OTHER; note = adenosine-3'-phosphate
  modified_base 3: mod_base = OTHER; note = guanosine-3'-phosphate
  modified_base 4: mod_base = OTHER; note = guanosine-3'-phosphate
  modified_base 5: mod_base = OTHER; note = cytidine-3'-phosphate
  modified_base 6: mod_base = OTHER; note = cytidine-3'-phosphate
  modified_base 7: mod_base = OTHER; note = guanosine-3'-phosphate
  modified_base 8: mod_base = OTHER; note = uridine-3'-phosphate
  modified_base 9: mod_base = OTHER; note = guanosine-3'-phosphate
  modified_base 10: mod_base = OTHER; note = cytidine-3'-phosphate
  modified_base 11: mod_base = OTHER; note = guanosine-3'-phosphate
  modified_base 12: mod_base = OTHER; note = cytidine-3'-phosphate
  modified_base 13: mod_base = OTHER; note = guanosine-3'-phosphate
  modified_base 14: mod_base = OTHER; note = guanosine-3'-phosphate
  modified_base 15: mod_base = OTHER; note = uridine-3'-phosphate
  modified_base 16: mod_base = OTHER; note = cytidine-3'-phosphate
  modified_base 17: mod_base = OTHER; note = cytidine-3'-phosphate
  modified_base 18: mod_base = OTHER; note = adenosine-3'-phosphate
  modified_base 19: mod_base = OTHER; note = cytidine-3'-phosphate
  misc_feature 1..19: note = RNA
  misc_feature 20..21: note = DNA
gaggccgtgcgcggtccactt

SEQ ID NO: 51 - DNA, 21 bp, synthetic construct
  source 1..21: mol_type = other DNA
  modified_base 1: mod_base = OTHER; note = uridine-3'-phosphate
  modified_base 2: mod_base = OTHER; note = guanosine-3'-phosphate
  modified_base 3: mod_base = OTHER; note = guanosine-3'-phosphate
  modified_base 4: mod_base = OTHER; note = adenosine-3'-phosphate
  modified_base 5: mod_base = OTHER; note = cytidine-3'-phosphate
  modified_base 6: mod_base = OTHER; note = cytidine-3'-phosphate
  modified_base 7: mod_base = OTHER; note = guanosine-3'-phosphate
  modified_base 8: mod_base = OTHER; note = cytidine-3'-phosphate
  modified_base 9: mod_base = OTHER; note = guanosine-3'-phosphate
  modified_base 10: mod_base = OTHER; note = cytidine-3'-phosphate
  modified_base 11: mod_base = OTHER; note = adenosine-3'-phosphate
  modified_base 12: mod_base = OTHER; note = cytidine-3'-phosphate
  modified_base 13: mod_base = OTHER; note = guanosine-3'-phosphate
  modified_base 14: mod_base = OTHER; note = guanosine-3'-phosphate
  modified_base 15: mod_base = OTHER; note = cytidine-3'-phosphate
  modified_base 16: mod_base = OTHER; note = cytidine-3'-phosphate
  modified_base 17: mod_base = OTHER; note = uridine-3'-phosphate
  modified_base 18: mod_base = OTHER; note = cytidine-3'-phosphate
  modified_base 19: mod_base = OTHER; note = uridine-3'-phosphate
  misc_feature 1..19: note = RNA
  misc_feature 20..21: note = DNA
tggaccgcgcacggcctcttt

SEQ ID NO: 52 - DNA, 21 bp, synthetic construct
  source 1..21: mol_type = other DNA
  modified_base 1: mod_base = OTHER; note = adenosine-3'-phosphate
  modified_base 2: mod_base = OTHER; note = guanosine-3'-phosphate
  modified_base 3: mod_base = OTHER; note = adenosine-3'-phosphate
  modified_base 4: mod_base = OTHER; note = guanosine-3'-phosphate
  modified_base 5: mod_base = OTHER; note = guanosine-3'-phosphate
  modified_base 6: mod_base = OTHER; note = cytidine-3'-phosphate
  modified_base 7: mod_base = OTHER; note = cytidine-3'-phosphate
  modified_base 8: mod_base = OTHER; note = guanosine-3'-phosphate
  modified_base 9: mod_base = OTHER; note = uridine-3'-phosphate
  modified_base 10: mod_base = OTHER; note = guanosine-3'-phosphate
  modified_base 11: mod_base = OTHER; note = cytidine-3'-phosphate
  modified_base 12: mod_base = OTHER; note = guanosine-3'-phosphate
  modified_base 13: mod_base = OTHER; note = cytidine-3'-phosphate
  modified_base 14: mod_base = OTHER; note = guanosine-3'-phosphate
  modified_base 15: mod_base = OTHER; note = guanosine-3'-phosphate
  modified_base 16: mod_base = OTHER; note = uridine-3'-phosphate
  modified_base 17: mod_base = OTHER; note = cytidine-3'-phosphate
  modified_base 18: mod_base = OTHER; note = cytidine-3'-phosphate
  modified_base 19: mod_base = OTHER; note = adenosine-3'-phosphate
  misc_feature 1..19: note = RNA
  misc_feature 20..21: note = DNA
agaggccgtgcgcggtccatt

SEQ ID NO: 53 - DNA, 21 bp, synthetic construct
  source 1..21: mol_type = other DNA
  modified_base 1: mod_base = OTHER; note = guanosine-3'-phosphate
  modified_base 2: mod_base = OTHER; note = guanosine-3'-phosphate
  modified_base 3: mod_base = OTHER; note = adenosine-3'-phosphate
  modified_base 4: mod_base = OTHER; note = cytidine-3'-phosphate
  modified_base 5: mod_base = OTHER; note = cytidine-3'-phosphate
  modified_base 6: mod_base = OTHER; note = guanosine-3'-phosphate
  modified_base 7: mod_base = OTHER; note = cytidine-3'-phosphate
  modified_base 8: mod_base = OTHER; note = guanosine-3'-phosphate
  modified_base 9: mod_base = OTHER; note = cytidine-3'-phosphate
  modified_base 10: mod_base = OTHER; note = adenosine-3'-phosphate
  modified_base 11: mod_base = OTHER; note = cytidine-3'-phosphate
  modified_base 12: mod_base = OTHER; note = guanosine-3'-phosphate
  modified_base 13: mod_base = OTHER; note = guanosine-3'-phosphate
  modified_base 14: mod_base = OTHER; note = cytidine-3'-phosphate
  modified_base 15: mod_base = OTHER; note = cytidine-3'-phosphate
  modified_base 16: mod_base = OTHER; note = uridine-3'-phosphate
  modified_base 17: mod_base = OTHER; note = cytidine-3'-phosphate
  modified_base 18: mod_base = OTHER; note = uridine-3'-phosphate
  modified_base 19: mod_base = OTHER; note = adenosine-3'-phosphate
  misc_feature 1..19: note = RNA
  misc_feature 20..21: note = DNA
ggaccgcgcacggcctctatt

SEQ ID NO: 54 - DNA, 21 bp, synthetic construct
  source 1..21: mol_type = other DNA
  modified_base 1: mod_base = OTHER; note = uridine-3'-phosphate
  modified_base 2: mod_base = OTHER; note = adenosine-3'-phosphate
  modified_base 3: mod_base = OTHER; note = guanosine-3'-phosphate
  modified_base 4: mod_base = OTHER; note = adenosine-3'-phosphate
  modified_base 5: mod_base = OTHER; note = guanosine-3'-phosphate
  modified_base 6: mod_base = OTHER; note = guanosine-3'-phosphate
  modified_base 7: mod_base = OTHER; note = cytidine-3'-phosphate
  modified_base 8: mod_base = OTHER; note = cytidine-3'-phosphate
  modified_base 9: mod_base = OTHER; note = guanosine-3'-phosphate
  modified_base 10: mod_base = OTHER; note = uridine-3'-phosphate
  modified_base 11: mod_base = OTHER; note = guanosine-3'-phosphate
  modified_base 12: mod_base = OTHER; note = cytidine-3'-phosphate
  modified_base 13: mod_base = OTHER; note = guanosine-3'-phosphate
  modified_base 14: mod_base = OTHER; note = cytidine-3'-phosphate
  modified_base 15: mod_base = OTHER; note = guanosine-3'-phosphate
  modified_base 16: mod_base = OTHER; note = guanosine-3'-phosphate
  modified_base 17: mod_base = OTHER; note = uridine-3'-phosphate
  modified_base 18: mod_base = OTHER; note = cytidine-3'-phosphate
  modified_base 19: mod_base = OTHER; note = cytidine-3'-phosphate
  misc_feature 1..19: note = RNA
  misc_feature 20..21: note = DNA
tagaggccgtgcgcggtcctt

SEQ ID NO: 55 - DNA, 21 bp, synthetic construct
  source 1..21: mol_type = other DNA
  modified_base 1: mod_base = OTHER; note = guanosine-3'-phosphate
  modified_base 2: mod_base = OTHER; note = adenosine-3'-phosphate
  modified_base 3: mod_base = OTHER; note = cytidine-3'-phosphate
  modified_base 4: mod_base = OTHER; note = cytidine-3'-phosphate
  modified_base 5: mod_base = OTHER; note = guanosine-3'-phosphate
  modified_base 6: mod_base = OTHER; note = cytidine-3'-phosphate
  modified_base 7: mod_base = OTHER; note = guanosine-3'-phosphate
  modified_base 8: mod_base = OTHER; note = cytidine-3'-phosphate
  modified_base 9: mod_base = OTHER; note = adenosine-3'-phosphate
  modified_base 10: mod_base = OTHER; note = cytidine-3'-phosphate
  modified_base 11: mod_base = OTHER; note = guanosine-3'-phosphate
  modified_base 12: mod_base = OTHER; note = guanosine-3'-phosphate
  modified_base 13: mod_base = OTHER; note = cytidine-3'-phosphate
  modified_base 14: mod_base = OTHER; note = cytidine-3'-phosphate
  modified_base 15: mod_base = OTHER; note = uridine-3'-phosphate
  modified_base 16: mod_base = OTHER; note = cytidine-3'-phosphate
  modified_base 17: mod_base = OTHER; note = uridine-3'-phosphate
  modified_base 18: mod_base = OTHER; note = adenosine-3'-phosphate
  modified_base 19: mod_base = OTHER; note = guanosine-3'-phosphate
  misc_feature 1..19: note = RNA
  misc_feature 20..21: note = DNA
gaccgcgcacggcctctagtt

SEQ ID NO: 56 - DNA, 21 bp, synthetic construct
  source 1..21: mol_type = other DNA
  modified_base 1: mod_base = OTHER; note = cytidine-3'-phosphate
  modified_base 2: mod_base = OTHER; note = uridine-3'-phosphate
  modified_base 3: mod_base = OTHER; note = adenosine-3'-phosphate
  modified_base 4: mod_base = OTHER; note = guanosine-3'-phosphate
  modified_base 5: mod_base = OTHER; note = adenosine-3'-phosphate
  modified_base 6: mod_base = OTHER; note = guanosine-3'-phosphate
  modified_base 7: mod_base = OTHER; note = guanosine-3'-phosphate
  modified_base 8: mod_base = OTHER; note = cytidine-3'-phosphate
  modified_base 9: mod_base = OTHER; note = cytidine-3'-phosphate
  modified_base 10: mod_base = OTHER; note = guanosine-3'-phosphate
  modified_base 11: mod_base = OTHER; note = uridine-3'-phosphate
  modified_base 12: mod_base = OTHER; note = guanosine-3'-phosphate
  modified_base 13: mod_base = OTHER; note = cytidine-3'-phosphate
  modified_base 14: mod_base = OTHER; note = guanosine-3'-phosphate
  modified_base 15: mod_base = OTHER; note = cytidine-3'-phosphate
  modified_base 16: mod_base = OTHER; note = guanosine-3'-phosphate
  modified_base 17: mod_base = OTHER; note = guanosine-3'-phosphate
  modified_base 18: mod_base = OTHER; note = uridine-3'-phosphate
  modified_base 19: mod_base = OTHER; note = cytidine-3'-phosphate
  misc_feature 1..19: note = RNA
  misc_feature 20..21: note = DNA
ctagaggccgtgcgcggtctt

SEQ ID NO: 57 - DNA, 21 bp, synthetic construct
  source 1..21: mol_type = other DNA
  modified_base 1: mod_base = OTHER; note = adenosine-3'-phosphate
  modified_base 2: mod_base = OTHER; note = cytidine-3'-phosphate
  modified_base 3: mod_base = OTHER; note = cytidine-3'-phosphate
  modified_base 4: mod_base = OTHER; note = guanosine-3'-phosphate
  modified_base 5: mod_base = OTHER; note = cytidine-3'-phosphate
  modified_base 6: mod_base = OTHER; note = guanosine-3'-phosphate
  modified_base 7: mod_base = OTHER; note = cytidine-3'-phosphate
  modified_base 8: mod_base = OTHER; note = adenosine-3'-phosphate
  modified_base 9: mod_base = OTHER; note = cytidine-3'-phosphate
  modified_base 10: mod_base = OTHER; note = guanosine-3'-phosphate
  modified_base 11: mod_base = OTHER; note = guanosine-3'-phosphate
  modified_base 12: mod_base = OTHER; note = cytidine-3'-phosphate
  modified_base 13: mod_base = OTHER; note = cytidine-3'-phosphate
  modified_base 14: mod_base = OTHER; note = uridine-3'-phosphate
  modified_base 15: mod_base = OTHER; note = cytidine-3'-phosphate
  modified_base 16: mod_base = OTHER; note = uridine-3'-phosphate
  modified_base 17: mod_base = OTHER; note = adenosine-3'-phosphate
  modified_base 18: mod_base = OTHER; note = guanosine-3'-phosphate
  modified_base 19: mod_base = OTHER; note = guanosine-3'-phosphate
  misc_feature 1..19: note = RNA
  misc_feature 20..21: note = DNA
accgcgcacggcctctaggtt

SEQ ID NO: 58 - DNA, 21 bp, synthetic construct
  source 1..21: mol_type = other DNA
  modified_base 1: mod_base = OTHER; note = cytidine-3'-phosphate
  modified_base 2: mod_base = OTHER; note = cytidine-3'-phosphate
  modified_base 3: mod_base = OTHER; note = uridine-3'-phosphate
  modified_base 4: mod_base = OTHER; note = adenosine-3'-phosphate
  modified_base 5: mod_base = OTHER; note = guanosine-3'-phosphate
  modified_base 6: mod_base = OTHER; note = adenosine-3'-phosphate
  modified_base 7: mod_base = OTHER; note = guanosine-3'-phosphate
  modified_base 8: mod_base = OTHER; note = guanosine-3'-phosphate
  modified_base 9: mod_base = OTHER; note = cytidine-3'-phosphate
  modified_base 10: mod_base = OTHER; note = cytidine-3'-phosphate
  modified_base 11: mod_base = OTHER; note = guanosine-3'-phosphate
  modified_base 12: mod_base = OTHER; note = uridine-3'-phosphate
  modified_base 13: mod_base = OTHER; note = guanosine-3'-phosphate
  modified_base 14: mod_base = OTHER; note = cytidine-3'-phosphate
  modified_base 15: mod_base = OTHER; note = guanosine-3'-phosphate
  modified_base 16: mod_base = OTHER; note = cytidine-3'-phosphate
  modified_base 17: mod_base = OTHER; note = guanosine-3'-phosphate
  modified_base 18: mod_base = OTHER; note = guanosine-3'-phosphate
  modified_base 19: mod_base = OTHER; note = uridine-3'-phosphate
  misc_feature 1..19: note = RNA
  misc_feature 20..21: note = DNA
cctagaggccgtgcgcggttt

SEQ ID NO: 59 - DNA, 21 bp, synthetic construct
  source 1..21: mol_type = other DNA
  modified_base 1: mod_base = OTHER; note = cytidine-3'-phosphate
  modified_base 2: mod_base = OTHER; note = cytidine-3'-phosphate
  modified_base 3: mod_base = OTHER; note = guanosine-3'-phosphate
  modified_base 4: mod_base = OTHER; note = cytidine-3'-phosphate
  modified_base 5: mod_base = OTHER; note = guanosine-3'-phosphate
  modified_base 6: mod_base = OTHER; note = cytidine-3'-phosphate
  modified_base 7: mod_base = OTHER; note = adenosine-3'-phosphate
  modified_base 8: mod_base = OTHER; note = cytidine-3'-phosphate
  modified_base 9: mod_base = OTHER; note = guanosine-3'-phosphate
  modified_base 10: mod_base = OTHER; note = guanosine-3'-phosphate
  modified_base 11: mod_base = OTHER; note = cytidine-3'-phosphate
  modified_base 12: mod_base = OTHER; note = cytidine-3'-phosphate
  modified_base 13: mod_base = OTHER; note = uridine-3'-phosphate
  modified_base 14: mod_base = OTHER; note = cytidine-3'-phosphate
  modified_base 15: mod_base = OTHER; note = uridine-3'-phosphate
  modified_base 16: mod_base = OTHER; note = adenosine-3'-phosphate
  modified_base 17: mod_base = OTHER; note = guanosine-3'-phosphate
  modified_base 18: mod_base = OTHER; note = guanosine-3'-phosphate
  modified_base 19: mod_base = OTHER; note = uridine-3'-phosphate
  misc_feature 1..19: note = RNA
  misc_feature 20..21: note = DNA
ccgcgcacggcctctaggttt

SEQ ID NO: 60 - DNA, 21 bp, synthetic construct
  source 1..21: mol_type = other DNA
  modified_base 1: mod_base = OTHER; note = adenosine-3'-phosphate
  modified_base 2: mod_base = OTHER; note = cytidine-3'-phosphate
  modified_base 3: mod_base = OTHER; note = cytidine-3'-phosphate
  modified_base 4: mod_base = OTHER; note = uridine-3'-phosphate
  modified_base 5: mod_base = OTHER; note = adenosine-3'-phosphate
  modified_base 6: mod_base = OTHER; note = guanosine-3'-phosphate
  modified_base 7: mod_base = OTHER; note = adenosine-3'-phosphate
  modified_base 8: mod_base = OTHER; note = guanosine-3'-phosphate
  modified_base 9: mod_base = OTHER; note = guanosine-3'-phosphate
  modified_base 10: mod_base = OTHER; note = cytidine-3'-phosphate
  modified_base 11: mod_base = OTHER; note = cytidine-3'-phosphate
  modified_base 12: mod_base = OTHER; note = guanosine-3'-phosphate
  modified_base 13: mod_base = OTHER; note = uridine-3'-phosphate
  modified_base 14: mod_base = OTHER; note = guanosine-3'-phosphate
  modified_base 15: mod_base = OTHER; note = cytidine-3'-phosphate
  modified_base 16: mod_base = OTHER; note = guanosine-3'-phosphate
  modified_base 17: mod_base = OTHER; note = cytidine-3'-phosphate
  modified_base 18: mod_base = OTHER; note = guanosine-3'-phosphate
  modified_base 19: mod_base = OTHER; note = guanosine-3'-phosphate
  misc_feature 1..19: note = RNA
  misc_feature 20..21: note = DNA
acctagaggccgtgcgcggtt

SEQ ID NO: 61 - DNA, 21 bp, synthetic construct
  source 1..21: mol_type = other DNA
  modified_base 1: mod_base = OTHER; note = cytidine-3'-phosphate
  modified_base 2: mod_base = OTHER; note = guanosine-3'-phosphate
  modified_base 3: mod_base = OTHER; note = cytidine-3'-phosphate
  modified_base 4: mod_base = OTHER; note = guanosine-3'-phosphate
  modified_base 5: mod_base = OTHER; note = cytidine-3'-phosphate
  modified_base 6: mod_base = OTHER; note = adenosine-3'-phosphate
  modified_base 7: mod_base = OTHER; note = cytidine-3'-phosphate
  modified_base 8: mod_base = OTHER; note = guanosine-3'-phosphate
  modified_base 9: mod_base = OTHER; note = guanosine-3'-phosphate
  modified_base 10: mod_base = OTHER; note = cytidine-3'-phosphate
  modified_base 11: mod_base = OTHER; note = cytidine-3'-phosphate
  modified_base 12: mod_base = OTHER; note = uridine-3'-phosphate
  modified_base 13: mod_base = OTHER; note = cytidine-3'-phosphate
  modified_base 14: mod_base = OTHER; note = uridine-3'-phosphate
  modified_base 15: mod_base = OTHER; note = adenosine-3'-phosphate
  modified_base 16: mod_base = OTHER; note = guanosine-3'-phosphate
  modified_base 17: mod_base = OTHER; note = guanosine-3'-phosphate
  modified_base 18: mod_base = OTHER; note = uridine-3'-phosphate
  modified_base 19: mod_base = OTHER; note = cytidine-3'-phosphate
  misc_feature 1..19: note = RNA
  misc_feature 20..21: note = DNA
cgcgcacggcctctaggtctt

SEQ ID NO: 62 - DNA, 21 bp, synthetic construct
  source 1..21: mol_type = other DNA
  modified_base 1: mod_base = OTHER; note = guanosine-3'-phosphate
  modified_base 2: mod_base = OTHER; note = adenosine-3'-phosphate
  modified_base 3: mod_base = OTHER; note = cytidine-3'-phosphate
  modified_base 4: mod_base = OTHER; note = cytidine-3'-phosphate
  modified_base 5: mod_base = OTHER; note = uridine-3'-phosphate
  modified_base 6: mod_base = OTHER; note = adenosine-3'-phosphate
  modified_base 7: mod_base = OTHER; note = guanosine-3'-phosphate
  modified_base 8: mod_base = OTHER; note = adenosine-3'-phosphate
  modified_base 9: mod_base = OTHER; note = guanosine-3'-phosphate
  modified_base 10: mod_base = OTHER; note = guanosine-3'-phosphate
  modified_base 11: mod_base = OTHER; note = cytidine-3'-phosphate
  modified_base 12: mod_base = OTHER; note = cytidine-3'-phosphate
  modified_base 13: mod_base = OTHER; note = guanosine-3'-phosphate
  modified_base 14: mod_base = OTHER; note = uridine-3'-phosphate
  modified_base 15: mod_base = OTHER; note = guanosine-3'-phosphate
  modified_base 16: mod_base = OTHER; note = cytidine-3'-phosphate
  modified_base 17: mod_base = OTHER; note = guanosine-3'-phosphate
  modified_base 18: mod_base = OTHER; note = cytidine-3'-phosphate
  modified_base 19: mod_base = OTHER; note = guanosine-3'-phosphate
  misc_feature 1..19: note = RNA
  misc_feature 20..21: note = DNA
gacctagaggccgtgcgcgtt

SEQ ID NO: 63 - DNA, 21 bp, synthetic construct
  source 1..21: mol_type = other DNA
  modified_base 1: mod_base = OTHER; note = guanosine-3'-phosphate
  modified_base 2: mod_base = OTHER; note = cytidine-3'-phosphate
  modified_base 3: mod_base = OTHER; note = guanosine-3'-phosphate
  modified_base 4: mod_base = OTHER; note = cytidine-3'-phosphate
  modified_base 5: mod_base = OTHER; note = adenosine-3'-phosphate
  modified_base 6: mod_base = OTHER; note = cytidine-3'-phosphate
  modified_base 7: mod_base = OTHER; note = guanosine-3'-phosphate
  modified_base 8: mod_base = OTHER; note = guanosine-3'-phosphate
  modified_base 9: mod_base = OTHER; note = cytidine-3'-phosphate
  modified_base 10: mod_base = OTHER; note = cytidine-3'-phosphate
  modified_base 11: mod_base = OTHER; note = uridine-3'-phosphate
  modified_base 12: mod_base = OTHER; note = cytidine-3'-phosphate
  modified_base 13: mod_base = OTHER; note = uridine-3'-phosphate
  modified_base 14: mod_base = OTHER; note = adenosine-3'-phosphate
  modified_base 15: mod_base = OTHER; note = guanosine-3'-phosphate
  modified_base 16: mod_base = OTHER; note = guanosine-3'-phosphate
  modified_base 17: mod_base = OTHER; note = uridine-3'-phosphate
  modified_base 18: mod_base = OTHER; note = cytidine-3'-phosphate
  modified_base 19: mod_base = OTHER; note = uridine-3'-phosphate
  misc_feature 1..19: note = RNA
  misc_feature 20..21: note = DNA
gcgcacggcctctaggtcttt

SEQ ID NO: 64 - DNA, 21 bp, synthetic construct
  source 1..21: mol_type = other DNA
  modified_base 1: mod_base = OTHER; note = adenosine-3'-phosphate
  modified_base 2: mod_base = OTHER; note = guanosine-3'-phosphate
  modified_base 3: mod_base = OTHER; note = adenosine-3'-phosphate
  modified_base 4: mod_base = OTHER; note = cytidine-3'-phosphate
  modified_base 5: mod_base = OTHER; note = cytidine-3'-phosphate
  modified_base 6: mod_base = OTHER; note = uridine-3'-phosphate
  modified_base 7: mod_base = OTHER; note = adenosine-3'-phosphate
  modified_base 8: mod_base = OTHER; note = guanosine-3'-phosphate
  modified_base 9: mod_base = OTHER; note = adenosine-3'-phosphate
  modified_base 10: mod_base = OTHER; note = guanosine-3'-phosphate
  modified_base 11: mod_base = OTHER; note = guanosine-3'-phosphate
  modified_base 12: mod_base = OTHER; note = cytidine-3'-phosphate
  modified_base 13: mod_base = OTHER; note = cytidine-3'-phosphate
  modified_base 14: mod_base = OTHER; note = guanosine-3'-phosphate
  modified_base 15: mod_base = OTHER; note = uridine-3'-phosphate
  modified_base 16: mod_base = OTHER; note = guanosine-3'-phosphate
  modified_base 17: mod_base = OTHER; note = cytidine-3'-phosphate
  modified_base 18: mod_base = OTHER; note = guanosine-3'-phosphate
  modified_base 19: mod_base = OTHER; note = cytidine-3'-phosphate
  misc_feature 1..19: note = RNA
  misc_feature 20..21: note = DNA
agacctagaggccgtgcgctt

SEQ ID NO: 65 - DNA, 21 bp, synthetic construct
  source 1..21: mol_type = other DNA
  modified_base 1: mod_base = OTHER; note = cytidine-3'-phosphate
  modified_base 2: mod_base = OTHER; note = guanosine-3'-phosphate
  modified_base 3: mod_base = OTHER; note = cytidine-3'-phosphate
  modified_base 4: mod_base = OTHER; note = adenosine-3'-phosphate
  modified_base 5: mod_base = OTHER; note = cytidine-3'-phosphate
  modified_base 6: mod_base = OTHER; note = guanosine-3'-phosphate
  modified_base 7: mod_base = OTHER; note = guanosine-3'-phosphate
  modified_base 8: mod_base = OTHER; note = cytidine-3'-phosphate
  modified_base 9: mod_base = OTHER; note = cytidine-3'-phosphate
  modified_base 10: mod_base = OTHER; note = uridine-3'-phosphate
  modified_base 11: mod_base = OTHER; note = cytidine-3'-phosphate
  modified_base 12: mod_base = OTHER; note = uridine-3'-phosphate
  modified_base 13: mod_base = OTHER; note = adenosine-3'-phosphate
  modified_base 14: mod_base = OTHER; note = guanosine-3'-phosphate
  modified_base 15: mod_base = OTHER; note = guanosine-3'-phosphate
  modified_base 16: mod_base = OTHER; note = uridine-3'-phosphate
  modified_base 17: mod_base = OTHER; note = cytidine-3'-phosphate
  modified_base 18: mod_base = OTHER; note = uridine-3'-phosphate
  modified_base 19: mod_base = OTHER; note = cytidine-3'-phosphate
  misc_feature 1..19: note = RNA
  misc_feature 20..21: note = DNA
cgcacggcctctaggtctctt

SEQ ID NO: 66 - DNA, 21 bp, synthetic construct
  source 1..21: mol_type = other DNA
  modified_base 1: mod_base = OTHER; note = guanosine-3'-phosphate
  modified_base 2: mod_base = OTHER; note = adenosine-3'-phosphate
  modified_base 3: mod_base = OTHER; note = guanosine-3'-phosphate
  modified_base 4: mod_base = OTHER; note = adenosine-3'-phosphate
  modified_base 5: mod_base = OTHER; note = cytidine-3'-phosphate
  modified_base 6: mod_base = OTHER; note = cytidine-3'-phosphate
  modified_base 7: mod_base = OTHER; note = uridine-3'-phosphate
  modified_base 8: mod_base = OTHER; note = adenosine-3'-phosphate
  modified_base 9: mod_base = OTHER; note = guanosine-3'-phosphate
  modified_base 10: mod_base = OTHER; note = adenosine-3'-phosphate
  modified_base 11: mod_base = OTHER; note = guanosine-3'-phosphate
  modified_base 12: mod_base = OTHER; note = guanosine-3'-phosphate
  modified_base 13: mod_base = OTHER; note = cytidine-3'-phosphate
  modified_base 14: mod_base = OTHER; note = cytidine-3'-phosphate
  modified_base 15: mod_base = OTHER; note = guanosine-3'-phosphate
  modified_base 16: mod_base = OTHER; note = uridine-3'-phosphate
  modified_base 17: mod_base = OTHER; note = guanosine-3'-phosphate
  modified_base 18: mod_base = OTHER; note = cytidine-3'-phosphate
  modified_base 19: mod_base = OTHER; note = guanosine-3'-phosphate
  misc_feature 1..19: note = RNA
  misc_feature 20..21: note = DNA
gagacctagaggccgtgcgtt

SEQ ID NO: 67 - DNA, 21 bp, synthetic construct
  source 1..21: mol_type = other DNA
  modified_base 1: mod_base = OTHER; note = cytidine-3'-phosphate
  modified_base 2: mod_base = OTHER; note = uridine-3'-phosphate
  modified_base 3: mod_base = OTHER; note = cytidine-3'-phosphate
  modified_base 4: mod_base = OTHER; note = uridine-3'-phosphate
  modified_base 5: mod_base = OTHER; note = adenosine-3'-phosphate
  modified_base 6: mod_base = OTHER; note = guanosine-3'-phosphate
  modified_base 7: mod_base = OTHER; note = guanosine-3'-phosphate
  modified_base 8: mod_base = OTHER; note = uridine-3'-phosphate
  modified_base 9: mod_base = OTHER; note = cytidine-3'-phosphate
  modified_base 10: mod_base = OTHER; note = uridine-3'-phosphate
  modified_base 11: mod_base = OTHER; note = cytidine-3'-phosphate
  modified_base 12: mod_base = OTHER; note = cytidine-3'-phosphate
  modified_base 13: mod_base = OTHER; note = uridine-3'-phosphate
  modified_base 14: mod_base = OTHER; note = cytidine-3'-phosphate
  modified_base 15: mod_base = OTHER; note = guanosine-3'-phosphate
  modified_base 16: mod_base = OTHER; note = cytidine-3'-phosphate
  modified_base 17: mod_base = OTHER; note = cytidine-3'-phosphate
  modified_base 18: mod_base = OTHER; note = adenosine-3'-phosphate
  modified_base 19: mod_base = OTHER; note = guanosine-3'-phosphate
  misc_feature 1..19: note = RNA
  misc_feature 20..21: note = DNA
ctctaggtctcctcgccagtt

SEQ ID NO: 68 - DNA, 21 bp, synthetic construct
  source 1..21: mol_type = other DNA
  modified_base 1: mod_base = OTHER; note = cytidine-3'-phosphate
  modified_base 2: mod_base = OTHER; note = uridine-3'-phosphate
  modified_base 3: mod_base = OTHER; note = guanosine-3'-phosphate
  modified_base 4: mod_base = OTHER; note = guanosine-3'-phosphate
  modified_base 5: mod_base = OTHER; note = cytidine-3'-phosphate
  modified_base 6: mod_base = OTHER; note = guanosine-3'-phosphate
  modified_base 7: mod_base = OTHER; note = adenosine-3'-phosphate
  modified_base 8: mod_base = OTHER; note = guanosine-3'-phosphate
  modified_base 9: mod_base = OTHER; note = guanosine-3'-phosphate
  modified_base 10: mod_base = OTHER; note = adenosine-3'-phosphate
  modified_base 11: mod_base = OTHER; note = guanosine-3'-phosphate
  modified_base 12: mod_base = OTHER; note = adenosine-3'-phosphate
  modified_base 13: mod_base = OTHER; note = cytidine-3'-phosphate
  modified_base 14: mod_base = OTHER; note = cytidine-3'-phosphate
  modified_base 15: mod_base = OTHER; note = uridine-3'-phosphate
  modified_base 16: mod_base = OTHER; note = adenosine-3'-phosphate
  modified_base 17: mod_base = OTHER; note = guanosine-3'-phosphate
  modified_base 18: mod_base = OTHER; note = adenosine-3'-phosphate
  modified_base 19: mod_base = OTHER; note = guanosine-3'-phosphate
  misc_feature 1..19: note = RNA
  misc_feature 20..21: note = DNA
ctggcgaggagacctagagtt

SEQ ID NO: 69 - DNA, 21 bp, synthetic construct
  source 1..21: mol_type = other DNA
  modified_base 1: mod_base = OTHER; note = uridine-3'-phosphate
  modified_base 2: mod_base = OTHER; note = cytidine-3'-phosphate
  modified_base 3: mod_base = OTHER; note = uridine-3'-phosphate
  modified_base 4: mod_base = OTHER; note = adenosine-3'-phosphate
  modified_base 5: mod_base = OTHER; note = guanosine-3'-phosphate
  modified_base 6: mod_base = OTHER; note = guanosine-3'-phosphate
  modified_base 7: mod_base = OTHER; note = uridine-3'-phosphate
  modified_base 8: mod_base = OTHER; note = cytidine-3'-phosphate
  modified_base 9: mod_base = OTHER; note = uridine-3'-phosphate
  modified_base 10: mod_base = OTHER; note = cytidine-3'-phosphate
  modified_base 11: mod_base = OTHER; note = cytidine-3'-phosphate
  modified_base 12: mod_base = OTHER; note = uridine-3'-phosphate
  modified_base 13: mod_base = OTHER; note = cytidine-3'-phosphate
  modified_base 14: mod_base = OTHER; note = guanosine-3'-phosphate
  modified_base 15: mod_base = OTHER; note = cytidine-3'-phosphate
  modified_base 16: mod_base = OTHER; note = cytidine-3'-phosphate
  modified_base 17: mod_base = OTHER; note = adenosine-3'-phosphate
  modified_base 18: mod_base = OTHER; note = guanosine-3'-phosphate
  modified_base 19: mod_base = OTHER; note = guanosine-3'-phosphate
  misc_feature 1..19: note = RNA
  misc_feature 20..21: note = DNA
tctaggtctcctcgccaggtt

SEQ ID NO: 70 - DNA, 21 bp, synthetic construct
  source 1..21: mol_type = other DNA
  modified_base 1: mod_base = OTHER; note = cytidine-3'-phosphate
  modified_base 2: mod_base = OTHER; note = cytidine-3'-phosphate
  modified_base 3: mod_base = OTHER; note = uridine-3'-phosphate
  modified_base 4: mod_base = OTHER; note = guanosine-3'-phosphate
  modified_base 5: mod_base = OTHER; note = guanosine-3'-phosphate
  modified_base 6: mod_base = OTHER; note = cytidine-3'-phosphate
  modified_base 7: mod_base = OTHER; note = guanosine-3'-phosphate
  modified_base 8: mod_base = OTHER; note = adenosine-3'-phosphate
  modified_base 9: mod_base = OTHER; note = guanosine-3'-phosphate
  modified_base 10: mod_base = OTHER; note = guanosine-3'-phosphate
  modified_base 11: mod_base = OTHER; note = adenosine-3'-phosphate
  modified_base 12: mod_base = OTHER; note = guanosine-3'-phosphate
  modified_base 13: mod_base = OTHER; note = adenosine-3'-phosphate
  modified_base 14: mod_base = OTHER; note = cytidine-3'-phosphate
  modified_base 15: mod_base = OTHER; note = cytidine-3'-phosphate
  modified_base 16: mod_base = OTHER; note = uridine-3'-phosphate
  modified_base 17: mod_base = OTHER; note = adenosine-3'-phosphate
  modified_base 18: mod_base = OTHER; note = guanosine-3'-phosphate
  modified_base 19: mod_base = OTHER; note = adenosine-3'-phosphate
  misc_feature 1..19: note = RNA
  misc_feature 20..21: note = DNA
cctggcgaggagacctagatt

SEQ ID NO: 71 - DNA, 21 bp, synthetic construct
  source 1..21: mol_type = other DNA
  modified_base 1: mod_base = OTHER; note = cytidine-3'-phosphate
  modified_base 2: mod_base = OTHER; note = uridine-3'-phosphate
  modified_base 3: mod_base = OTHER; note = adenosine-3'-phosphate
  modified_base 4: mod_base = OTHER; note = guanosine-3'-phosphate
  modified_base 5: mod_base = OTHER; note = guanosine-3'-phosphate
  modified_base 6: mod_base = OTHER; note = uridine-3'-phosphate
  modified_base 7: mod_base = OTHER; note = cytidine-3'-phosphate
  modified_base 8: mod_base = OTHER; note = uridine-3'-phosphate
  modified_base 9: mod_base = OTHER; note = cytidine-3'-phosphate
  modified_base 10: mod_base = OTHER; note = cytidine-3'-phosphate
  modified_base 11: mod_base = OTHER; note = uridine-3'-phosphate
  modified_base 12: mod_base = OTHER; note = cytidine-3'-phosphate
  modified_base 13: mod_base = OTHER; note = guanosine-3'-phosphate
  modified_base 14: mod_base = OTHER; note = cytidine-3'-phosphate
  modified_base 15: mod_base = OTHER; note = cytidine-3'-phosphate
  modified_base 16: mod_base = OTHER; note = adenosine-3'-phosphate
  modified_base 17: mod_base = OTHER; note = guanosine-3'-phosphate
  modified_base 18: mod_base = OTHER; note = guanosine-3'-phosphate
  modified_base 19: mod_base = OTHER; note = adenosine-3'-phosphate
  misc_feature 1..19: note = RNA
  misc_feature 20..21: note = DNA
ctaggtctcctcgccaggatt

SEQ ID NO: 72 - DNA, 21 bp, synthetic construct
  source 1..21: mol_type = other DNA
  modified_base 1: mod_base = OTHER; note = uridine-3'-phosphate
  modified_base 2: mod_base = OTHER; note = cytidine-3'-phosphate
  modified_base 3: mod_base = OTHER; note = cytidine-3'-phosphate
  modified_base 4: mod_base = OTHER; note = uridine-3'-phosphate
  modified_base 5: mod_base = OTHER; note = guanosine-3'-phosphate
  modified_base 6: mod_base = OTHER; note = guanosine-3'-phosphate
  modified_base 7: mod_base = OTHER; note = cytidine-3'-phosphate
  modified_base 8: mod_base = OTHER; note = guanosine-3'-phosphate
  modified_base 9: mod_base = OTHER; note = adenosine-3'-phosphate
  modified_base 10: mod_base = OTHER; note = guanosine-3'-phosphate
  modified_base 11: mod_base = OTHER; note = guanosine-3'-phosphate
  modified_base 12: mod_base = OTHER; note = adenosine-3'-phosphate
  modified_base 13: mod_base = OTHER; note = guanosine-3'-phosphate
  modified_base 14: mod_base = OTHER; note = adenosine-3'-phosphate
  modified_base 15: mod_base = OTHER; note = cytidine-3'-phosphate
  modified_base 16: mod_base = OTHER; note = cytidine-3'-phosphate
  modified_base 17: mod_base = OTHER; note = uridine-3'-phosphate
  modified_base 18: mod_base = OTHER; note = adenosine-3'-phosphate
  modified_base 19: mod_base = OTHER; note = guanosine-3'-phosphate
  misc_feature 1..19: note = RNA
  misc_feature 20..21: note = DNA
tcctggcgaggagacctagtt

SEQ ID NO: 73 - DNA, 21 bp, synthetic construct
  source 1..21: mol_type = other DNA
  modified_base 1: mod_base = OTHER; note = adenosine-3'-phosphate
  modified_base 2: mod_base = OTHER; note = guanosine-3'-phosphate
  modified_base 3: mod_base = OTHER; note = guanosine-3'-phosphate
  modified_base 4: mod_base = OTHER; note = uridine-3'-phosphate
  modified_base 5: mod_base = OTHER; note = cytidine-3'-phosphate
  modified_base 6: mod_base = OTHER; note = uridine-3'-phosphate
  modified_base 7: mod_base = OTHER; note = cytidine-3'-phosphate
  modified_base 8: mod_base = OTHER; note = cytidine-3'-phosphate
  modified_base 9: mod_base = OTHER; note = uridine-3'-phosphate
  modified_base 10: mod_base = OTHER; note = cytidine-3'-phosphate
  modified_base 11: mod_base = OTHER; note = guanosine-3'-phosphate
  modified_base 12: mod_base = OTHER; note = cytidine-3'-phosphate
  modified_base 13: mod_base = OTHER; note = cytidine-3'-phosphate
  modified_base 14: mod_base = OTHER; note = adenosine-3'-phosphate
  modified_base 15: mod_base = OTHER; note = guanosine-3'-phosphate
  modified_base 16: mod_base = OTHER; note = guanosine-3'-phosphate
  modified_base 17: mod_base = OTHER; note = adenosine-3'-phosphate
  modified_base 18: mod_base = OTHER; note = cytidine-3'-phosphate
  modified_base 19: mod_base = OTHER; note = adenosine-3'-phosphate
  misc_feature 1..19: note = RNA
  misc_feature 20..21: note = DNA
aggtctcctcgccaggacatt

SEQ ID NO: 74 - DNA, 21 bp, synthetic construct
  source 1..21: mol_type = other DNA
  modified_base 1: mod_base = OTHER; note = uridine-3'-phosphate
  modified_base 2: mod_base = OTHER; note = guanosine-3'-phosphate
  modified_base 3: mod_base = OTHER; note = uridine-3'-phosphate
  modified_base 4: mod_base = OTHER; note = cytidine-3'-phosphate
  modified_base 5: mod_base = OTHER; note = cytidine-3'-phosphate
  modified_base 6: mod_base = OTHER; note = uridine-3'-phosphate
  modified_base 7: mod_base = OTHER; note = guanosine-3'-phosphate
  modified_base 8: mod_base = OTHER; note = guanosine-3'-phosphate
  modified_base 9: mod_base = OTHER; note = cytidine-3'-phosphate
  modified_base 10: mod_base = OTHER; note = guanosine-3'-phosphate
  modified_base 11: mod_base = OTHER; note = adenosine-3'-phosphate
  modified_base 12: mod_base = OTHER; note = guanosine-3'-phosphate
  modified_base 13: mod_base = OTHER; note = guanosine-3'-phosphate
  modified_base 14: mod_base = OTHER; note = adenosine-3'-phosphate
  modified_base 15: mod_base = OTHER; note = guanosine-3'-phosphate
  modified_base 16: mod_base = OTHER; note = adenosine-3'-phosphate
  modified_base 17: mod_base = OTHER; note = cytidine-3'-phosphate
  modified_base 18: mod_base = OTHER; note = cytidine-3'-phosphate
  modified_base 19: mod_base = OTHER; note = uridine-3'-phosphate
  misc_feature 1..19: note = RNA
  misc_feature 20..21: note = DNA
tgtcctggcgaggagaccttt

SEQ ID NO: 75 - DNA, 21 bp, synthetic construct
  source 1..21: mol_type = other DNA
  modified_base 1: mod_base = OTHER; note = cytidine-3'-phosphate
  modified_base 2: mod_base = OTHER; note = cytidine-3'-phosphate
  modified_base 3: mod_base = OTHER; note = uridine-3'-phosphate
  modified_base 4: mod_base = OTHER; note = cytidine-3'-phosphate
  modified_base 5: mod_base = OTHER; note = guanosine-3'-phosphate
  modified_base 6: mod_base = OTHER; note = cytidine-3'-phosphate
  modified_base 7: mod_base = OTHER; note = cytidine-3'-phosphate
  modified_base 8: mod_base = OTHER; note = adenosine-3'-phosphate
  modified_base 9: mod_base = OTHER; note = guanosine-3'-phosphate
  modified_base 10: mod_base = OTHER; note = guanosine-3'-phosphate
  modified_base 11: mod_base = OTHER; note = adenosine-3'-phosphate
  modified_base 12: mod_base = OTHER; note = cytidine-3'-phosphate
  modified_base 13: mod_base = OTHER; note = adenosine-3'-phosphate
  modified_base 14: mod_base = OTHER; note = guanosine-3'-phosphate
  modified_base 15: mod_base = OTHER; note = cytidine-3'-phosphate
  modified_base 16: mod_base = OTHER; note = adenosine-3'-phosphate
  modified_base 17: mod_base = OTHER; note = adenosine-3'-phosphate
  modified_base 18: mod_base = OTHER; note = cytidine-3'-phosphate
  modified_base 19: mod_base = OTHER; note = cytidine-3'-phosphate
  misc_feature 1..19: note = RNA
  misc_feature 20..21: note = DNA
cctcgccaggacagcaacctt

SEQ ID NO: 76 - DNA, 21 bp, synthetic construct
  source 1..21: mol_type = other DNA
  modified_base 1: mod_base = OTHER; note = guanosine-3'-phosphate
  modified_base 2: mod_base = OTHER; note = guanosine-3'-phosphate
  modified_base 3: mod_base = OTHER; note = uridine-3'-phosphate
  modified_base 4: mod_base = OTHER; note = uridine-3'-phosphate
  modified_base 5: mod_base = OTHER; note = guanosine-3'-phosphate
  modified_base 6: mod_base = OTHER; note = cytidine-3'-phosphate
  modified_base 7: mod_base = OTHER; note = uridine-3'-phosphate
  modified_base 8: mod_base = OTHER; note = guanosine-3'-phosphate
  modified_base 9: mod_base = OTHER; note = uridine-3'-phosphate
  modified_base 10: mod_base = OTHER; note = cytidine-3'-phosphate
  modified_base 11: mod_base = OTHER; note = cytidine-3'-phosphate
  modified_base 12: mod_base = OTHER; note = uridine-3'-phosphate
  modified_base 13: mod_base = OTHER; note = guanosine-3'-phosphate
  modified_base 14: mod_base = OTHER; note = guanosine-3'-phosphate
  modified_base 15: mod_base = OTHER; note = cytidine-3'-phosphate
  modified_base 16: mod_base = OTHER; note = guanosine-3'-phosphate
  modified_base 17: mod_base = OTHER; note = adenosine-3'-phosphate
  modified_base 18: mod_base = OTHER; note = guanosine-3'-phosphate
  modified_base 19: mod_base = OTHER; note = guanosine-3'-phosphate
  misc_feature 1..19: note = RNA
  misc_feature 20..21: note = DNA
ggttgctgtcctggcgaggtt

SEQ ID NO: 77 - DNA, 21 bp, synthetic construct
  source 1..21: mol_type = other DNA
  modified_base 1: mod_base = OTHER; note = cytidine-3'-phosphate
  modified_base 2: mod_base = OTHER; note = guanosine-3'-phosphate
  modified_base 3: mod_base = OTHER; note = uridine-3'-phosphate
  modified_base 4: mod_base = OTHER; note = cytidine-3'-phosphate
  modified_base 5: mod_base = OTHER; note = adenosine-3'-phosphate
  modified_base 6: mod_base = OTHER; note = guanosine-3'-phosphate
  modified_base 7: mod_base = OTHER; note = cytidine-3'-phosphate
  modified_base 8: mod_base = OTHER; note = uridine-3'-phosphate
  modified_base 9: mod_base = OTHER; note = cytidine-3'-phosphate
  modified_base 10: mod_base = OTHER; note = cytidine-3'-phosphate
  modified_base 11: mod_base = OTHER; note = adenosine-3'-phosphate
  modified_base 12: mod_base = OTHER; note = guanosine-3'-phosphate
  modified_base 13: mod_base = OTHER; note = guanosine-3'-phosphate
  modified_base 14: mod_base = OTHER; note = cytidine-3'-phosphate
  modified_base 15: mod_base = OTHER; note = guanosine-3'-phosphate
  modified_base 16: mod_base = OTHER; note = guanosine-3'-phosphate
  modified_base 17: mod_base = OTHER; note = uridine-3'-phosphate
  modified_base 18: mod_base = OTHER; note = cytidine-3'-phosphate
  modified_base 19: mod_base = OTHER; note = cytidine-3'-phosphate
  modified_base 20: mod_base = OTHER; note = 2'-deoxythymidine-3'-phosphorothioate
  misc_feature 1..19: note = RNA
  misc_feature 20..21: note = DNA
cgtcagctccaggcggtcctt

SEQ ID NO: 78 - DNA, 21 bp, synthetic construct
  source 1..21: mol_type = other DNA
  modified_base 1: mod_base = OTHER; note = guanosine-3'-phosphate
  modified_base 2: mod_base = OTHER; note = guanosine-3'-phosphate
  modified_base 3: mod_base = OTHER; note = adenosine-3'-phosphate
  modified_base 4: mod_base = OTHER; note = cytidine-3'-phosphate
  modified_base 5: mod_base = OTHER; note = cytidine-3'-phosphate
  modified_base 6: mod_base = OTHER; note = guanosine-3'-phosphate
  modified_base 7: mod_base = OTHER; note = cytidine-3'-phosphate
  modified_base 8: mod_base = OTHER; note = cytidine-3'-phosphate
  modified_base 9: mod_base = OTHER; note = uridine-3'-phosphate
  modified_base 10: mod_base = OTHER; note = guanosine-3'-phosphate
  modified_base 11: mod_base = OTHER; note = guanosine-3'-phosphate
  modified_base 12: mod_base = OTHER; note = adenosine-3'-phosphate
  modified_base 13: mod_base = OTHER; note = guanosine-3'-phosphate
  modified_base 14: mod_base = OTHER; note = cytidine-3'-phosphate
  modified_base 15: mod_base = OTHER; note = uridine-3'-phosphate
  modified_base 16: mod_base = OTHER; note = guanosine-3'-phosphate
  modified_base 17: mod_base = OTHER; note = adenosine-3'-phosphate
  modified_base 18: mod_base = OTHER; note = cytidine-3'-phosphate
  modified_base 19: mod_base = OTHER; note = guanosine-3'-phosphate
  modified_base 20: mod_base = OTHER; note = 2'-deoxythymidine-3'-phosphorothioate
  misc_feature 1..19: note = RNA
  misc_feature 20..21: note = DNA
ggaccgcctggagctgacgtt

SEQ ID NO: 79 - DNA, 21 bp, synthetic construct
  source 1..21: mol_type = other DNA
  modified_base 1: mod_base = OTHER; note = 2'-O-methylcytidine-3'-phosphate
  modified_base 2: mod_base = OTHER; note = guanosine-3'-phosphate
  modified_base 3: mod_base = OTHER; note = 2'-O-methyluridine-3'-phosphate
  modified_base 4: mod_base = OTHER; note = 2'-O-methylcytidine-3'-phosphate
  modified_base 5: mod_base = OTHER; note = adenosine-3'-phosphate
  modified_base 6: mod_base = OTHER; note = guanosine-3'-phosphate
  modified_base 7: mod_base = OTHER; note = 2'-O-methylcytidine-3'-phosphate
  modified_base 8: mod_base = OTHER; note = 2'-O-methyluridine-3'-phosphate
  modified_base 9: mod_base = OTHER; note = 2'-O-methylcytidine-3'-phosphate
  modified_base 10: mod_base = OTHER; note = 2'-O-methylcytidine-3'-phosphate
  modified_base 11: mod_base = OTHER; note = adenosine-3'-phosphate
  modified_base 12: mod_base = OTHER; note = guanosine-3'-phosphate
  modified_base 13: mod_base = OTHER; note = guanosine-3'-phosphate
  modified_base 14: mod_base = OTHER; note = 2'-O-methylcytidine-3'-phosphate
  modified_base 15: mod_base = OTHER; note = guanosine-3'-phosphate
  modified_base 16: mod_base = OTHER; note = guanosine-3'-phosphate
  modified_base 17: mod_base = OTHER; note = 2'-O-methyluridine-3'-phosphate
  modified_base 18: mod_base = OTHER; note = 2'-O-methylcytidine-3'-phosphate
  modified_base 19: mod_base = OTHER; note = 2'-O-methylcytidine-3'-phosphate
  modified_base 20: mod_base = OTHER; note = 2'-deoxythymidine-3'-phosphorothioate
  misc_feature 1..19: note = RNA
  misc_feature 20..21: note = DNA
cgtcagctccaggcggtcctt

SEQ ID NO: 80 - DNA, 21 bp, synthetic construct
  source 1..21: mol_type = other DNA
  modified_base 1: mod_base = OTHER; note = guanosine-3'-phosphate
  modified_base 2: mod_base = OTHER; note = guanosine-3'-phosphate
  modified_base 3: mod_base = OTHER; note = adenosine-3'-phosphate
  modified_base 4: mod_base = OTHER; note = cytidine-3'-phosphate
  modified_base 5: mod_base = OTHER; note = cytidine-3'-phosphate
  modified_base 6: mod_base = OTHER; note = guanosine-3'-phosphate
  modified_base 7: mod_base = OTHER; note = cytidine-3'-phosphate
  modified_base 8: mod_base = OTHER; note = cytidine-3'-phosphate
  modified_base 9: mod_base = OTHER; note = uridine-3'-phosphate
  modified_base 10: mod_base = OTHER; note = guanosine-3'-phosphate
  modified_base 11: mod_base = OTHER; note = guanosine-3'-phosphate
  modified_base 12: mod_base = OTHER; note = adenosine-3'-phosphate
  modified_base 13: mod_base = OTHER; note = guanosine-3'-phosphate
  modified_base 14: mod_base = OTHER; note = cytidine-3'-phosphate
  modified_base 15: mod_base = OTHER; note = uridine-3'-phosphate
  modified_base 16: mod_base = OTHER; note = guanosine-3'-phosphate
  modified_base 17: mod_base = OTHER; note = adenosine-3'-phosphate
  modified_base 18: mod_base = OTHER; note = cytidine-3'-phosphate
  modified_base 19: mod_base = OTHER; note = guanosine-3'-phosphate
  modified_base 20: mod_base = OTHER; note = 2'-deoxythymidine-3'-phosphorothioate
  misc_feature 1..19: note = RNA
  misc_feature 20..21: note = DNA
ggaccgcctggagctgacgtt

SEQ ID NO: 81 - DNA, 21 bp, synthetic construct
  source 1..21: mol_type = other DNA
  modified_base 1: mod_base = OTHER; note = guanosine-3'-phosphate
  modified_base 2: mod_base = OTHER; note = uridine-3'-phosphate
  modified_base 3: mod_base = OTHER; note = cytidine-3'-phosphate
  modified_base 4: mod_base = OTHER; note = adenosine-3'-phosphate
  modified_base 5: mod_base = OTHER; note = guanosine-3'-phosphate
  modified_base 6: mod_base = OTHER; note = cytidine-3'-phosphate
  modified_base 7: mod_base = OTHER; note = uridine-3'-phosphate
  modified_base 8: mod_base = OTHER; note = cytidine-3'-phosphate
  modified_base 9: mod_base = OTHER; note = cytidine-3'-phosphate
  modified_base 10: mod_base = OTHER; note = adenosine-3'-phosphate
  modified_base 11: mod_base = OTHER; note = guanosine-3'-phosphate
  modified_base 12: mod_base = OTHER; note = guanosine-3'-phosphate
  modified_base 13: mod_base = OTHER; note = cytidine-3'-phosphate
  modified_base 14: mod_base = OTHER; note = guanosine-3'-phosphate
  modified_base 15: mod_base = OTHER; note = guanosine-3'-phosphate
  modified_base 16: mod_base = OTHER; note = uridine-3'-phosphate
  modified_base 17: mod_base = OTHER; note = cytidine-3'-phosphate
  modified_base 18: mod_base = OTHER; note = cytidine-3'-phosphate
  modified_base 19: mod_base = OTHER; note = uridine-3'-phosphate
  modified_base 20: mod_base = OTHER; note = 2'-deoxythymidine-3'-phosphorothioate
  misc_feature 1..19: note = RNA
  misc_feature 20..21: note = DNA
gtcagctccaggcggtccttt

SEQ ID NO: 82 - DNA, 21 bp, synthetic construct
  source 1..21: mol_type = other DNA
  modified_base 1: mod_base = OTHER; note = adenosine-3'-phosphate
  modified_base 2: mod_base = OTHER; note = guanosine-3'-phosphate
  modified_base 3: mod_base = OTHER; note = guanosine-3'-phosphate
  modified_base 4: mod_base = OTHER; note = adenosine-3'-phosphate
  modified_base 5: mod_base = OTHER; note = cytidine-3'-phosphate
  modified_base 6: mod_base = OTHER; note = cytidine-3'-phosphate
  modified_base 7: mod_base = OTHER; note = guanosine-3'-phosphate
  modified_base 8: mod_base = OTHER; note = cytidine-3'-phosphate
  modified_base 9: mod_base = OTHER; note = cytidine-3'-phosphate
  modified_base 10: mod_base = OTHER; note = uridine-3'-phosphate
  modified_base 11: mod_base = OTHER; note = guanosine-3'-phosphate
  modified_base 12: mod_base = OTHER; note = guanosine-3'-phosphate
  modified_base 13: mod_base = OTHER; note = adenosine-3'-phosphate
  modified_base 14: mod_base = OTHER; note = guanosine-3'-phosphate
  modified_base 15: mod_base = OTHER; note = cytidine-3'-phosphate
  modified_base 16: mod_base = OTHER; note = uridine-3'-phosphate
  modified_base 17: mod_base = OTHER; note = guanosine-3'-phosphate
  modified_base 18: mod_base = OTHER; note = adenosine-3'-phosphate
  modified_base 19: mod_base = OTHER; note = cytidine-3'-phosphate
  modified_base 20: mod_base = OTHER; note = 2'-deoxythymidine-3'-phosphorothioate
  misc_feature 1..19: note = RNA
  misc_feature 20..21: note = DNA
aggaccgcctggagctgactt

SEQ ID NO: 83 - DNA, 21 bp, synthetic construct
  source 1..21: mol_type = other DNA
  modified_base 1: mod_base = OTHER; note = guanosine-3'-phosphate
  modified_base 2: mod_base = OTHER; note = 2'-O-methyluridine-3'-phosphate
  modified_base 3: mod_base = OTHER; note = 2'-O-methylcytidine-3'-phosphate
  modified_base 4: mod_base = OTHER; note = adenosine-3'-phosphate
  modified_base 5: mod_base = OTHER; note = guanosine-3'-phosphate
  modified_base 6: mod_base = OTHER; note = 2'-O-methylcytidine-3'-phosphate
  modified_base 7: mod_base = OTHER; note = 2'-O-methyluridine-3'-phosphate
  modified_base 8: mod_base = OTHER; note = 2'-O-methylcytidine-3'-phosphate
  modified_base 9: mod_base = OTHER; note = 2'-O-methylcytidine-3'-phosphate
  modified_base 10: mod_base = OTHER; note = adenosine-3'-phosphate
  modified_base 11: mod_base = OTHER; note = guanosine-3'-phosphate
  modified_base 12: mod_base = OTHER; note = guanosine-3'-phosphate
  modified_base 13: mod_base = OTHER; note = 2'-O-methylcytidine-3'-phosphate
  modified_base 14: mod_base = OTHER; note = guanosine-3'-phosphate
  modified_base 15: mod_base = OTHER; note = guanosine-3'-phosphate
  modified_base 16: mod_base = OTHER; note = 2'-O-methyluridine-3'-phosphate
  modified_base 17: mod_base = OTHER; note = 2'-O-methylcytidine-3'-phosphate
  modified_base 18: mod_base = OTHER; note = 2'-O-methylcytidine-3'-phosphate
  modified_base 19: mod_base = OTHER; note = 2'-O-methyluridine-3'-phosphate
  modified_base 20: mod_base = OTHER; note = 2'-deoxythymidine-3'-phosphorothioate
  misc_feature 1..19: note = RNA
  misc_feature 20..21: note = DNA
gtcagctccaggcggtccttt

SEQ ID NO: 84 - DNA, 21 bp, synthetic construct
  source 1..21: mol_type = other DNA
  modified_base 1: mod_base = OTHER; note = adenosine-3'-phosphate
  modified_base 2: mod_base = OTHER; note = guanosine-3'-phosphate
  modified_base 3: mod_base = OTHER; note = guanosine-3'-phosphate
  modified_base 4: mod_base = OTHER; note = adenosine-3'-phosphate
  modified_base 5: mod_base = OTHER; note = cytidine-3'-phosphate
  modified_base 6: mod_base = OTHER; note = cytidine-3'-phosphate
  modified_base 7: mod_base = OTHER; note = guanosine-3'-phosphate
  modified_base 8: mod_base = OTHER; note = cytidine-3'-phosphate
  modified_base 9: mod_base = OTHER; note = cytidine-3'-phosphate
  modified_base 10: mod_base = OTHER; note = uridine-3'-phosphate
  modified_base 11: mod_base = OTHER; note = guanosine-3'-phosphate
  modified_base 12: mod_base = OTHER; note = guanosine-3'-phosphate
  modified_base 13: mod_base = OTHER; note = adenosine-3'-phosphate
  modified_base 14: mod_base = OTHER; note = guanosine-3'-phosphate
  modified_base 15: mod_base = OTHER; note = cytidine-3'-phosphate
  modified_base 16: mod_base = OTHER; note = uridine-3'-phosphate
  modified_base 17: mod_base = OTHER; note = guanosine-3'-phosphate
  modified_base 18: mod_base = OTHER; note = adenosine-3'-phosphate
  modified_base 19: mod_base = OTHER; note = cytidine-3'-phosphate
  modified_base 20: mod_base = OTHER; note = 2'-deoxythymidine-3'-phosphorothioate
  misc_feature 1..19: note = RNA
  misc_feature 20..21: note = DNA
aggaccgcctggagctgactt

SEQ ID NO: 85 - DNA, 21 bp, synthetic construct
  source 1..21: mol_type = other DNA
  modified_base 1: mod_base = OTHER; note = guanosine-3'-phosphate
  modified_base 2: mod_base = OTHER; note = guanosine-3'-phosphate
  modified_base 3: mod_base = OTHER; note = cytidine-3'-phosphate
  modified_base 4: mod_base = OTHER; note = guanosine-3'-phosphate
  modified_base 5: mod_base = OTHER; note = cytidine-3'-phosphate
  modified_base 6: mod_base = OTHER; note = cytidine-3'-phosphate
  modified_base 7: mod_base = OTHER; note = cytidine-3'-phosphate
  modified_base 8: mod_base = OTHER; note = guanosine-3'-phosphate
  modified_base 9: mod_base = OTHER; note = uridine-3'-phosphate
  modified_base 10: mod_base = OTHER; note = guanosine-3'-phosphate
  modified_base 11: mod_base = OTHER; note = cytidine-3'-phosphate
  modified_base 12: mod_base = OTHER; note = guanosine-3'-phosphate
  modified_base 13: mod_base = OTHER; note = cytidine-3'-phosphate
  modified_base 14: mod_base = OTHER; note = adenosine-3'-phosphate
  modified_base 15: mod_base = OTHER; note = guanosine-3'-phosphate
  modified_base 16: mod_base = OTHER; note = guanosine-3'-phosphate
  modified_base 17: mod_base = OTHER; note = adenosine-3'-phosphate
  modified_base 18: mod_base = OTHER; note = guanosine-3'-phosphate
  modified_base 19: mod_base = OTHER; note = guanosine-3'-phosphate
  misc_feature 1..19: note = RNA
  misc_feature 20..21: note = DNA
ggcgcccgtgcgcaggaggtt

SEQ ID NO: 86 - DNA, 21 bp, synthetic construct
  source 1..21: mol_type = other DNA
  modified_base 1: mod_base = OTHER; note = cytidine-3'-phosphate
  modified_base 2: mod_base = OTHER; note = cytidine-3'-phosphate
  modified_base 3: mod_base = OTHER; note = uridine-3'-phosphate
  modified_base 4: mod_base = OTHER; note = cytidine-3'-phosphate
  modified_base 5: mod_base = OTHER; note = cytidine-3'-phosphate
  modified_base 6: mod_base = OTHER; note = uridine-3'-phosphate
  modified_base 7: mod_base = OTHER; note = guanosine-3'-phosphate
  modified_base 8: mod_base = OTHER; note = cytidine-3'-phosphate
  modified_base 9: mod_base = OTHER; note = guanosine-3'-phosphate
  modified_base 10: mod_base = OTHER; note = cytidine-3'-phosphate
  modified_base 11: mod_base = OTHER; note = adenosine-3'-phosphate
  modified_base 12: mod_base = OTHER; note = cytidine-3'-phosphate
  modified_base 13: mod_base = OTHER; note = guanosine-3'-phosphate
  modified_base 14: mod_base = OTHER; note = guanosine-3'-phosphate
  modified_base 15: mod_base = OTHER; note = guanosine-3'-phosphate
  modified_base 16: mod_base = OTHER; note = cytidine-3'-phosphate
  modified_base 17: mod_base = OTHER; note = guanosine-3'-phosphate
  modified_base 18: mod_base = OTHER; note = cytidine-3'-phosphate
  modified_base 19: mod_base = OTHER; note = cytidine-3'-phosphate
  misc_feature 1..19: note = RNA
  misc_feature 20..21: note = DNA
cctcctgcgcacgggcgcctt

SEQ ID NO: 87 - DNA, 21 bp, synthetic construct
  source 1..21: mol_type = other DNA
  modified_base 1: mod_base = OTHER; note = guanosine-3'-phosphate
  modified_base 2: mod_base = OTHER; note = guanosine-3'-phosphate
  modified_base 3: mod_base = OTHER; note = adenosine-3'-phosphate
  modified_base 4: mod_base = OTHER; note = guanosine-3'-phosphate
  modified_base 5: mod_base = OTHER; note = cytidine-3'-phosphate
  modified_base 6: mod_base = OTHER; note = uridine-3'-phosphate
  modified_base 7: mod_base = OTHER; note = guanosine-3'-phosphate
  modified_base 8: mod_base = OTHER; note = guanosine-3'-phosphate
  modified_base 9: mod_base = OTHER; note = uridine-3'-phosphate
  modified_base 10: mod_base = OTHER; note = guanosine-3'-phosphate
  modified_base 11: mod_base = OTHER; note = cytidine-3'-phosphate
  modified_base 12: mod_base = OTHER; note = uridine-3'-phosphate
  modified_base 13: mod_base = OTHER; note = adenosine-3'-phosphate
  modified_base 14: mod_base = OTHER; note = guanosine-3'-phosphate
  modified_base 15: mod_base = OTHER; note = cytidine-3'-phosphate
  modified_base 16: mod_base = OTHER; note = cytidine-3'-phosphate
  modified_base 17: mod_base = OTHER; note = uridine-3'-phosphate
  modified_base 18: mod_base = OTHER; note = uridine-3'-phosphate
  modified_base 19: mod_base = OTHER; note = guanosine-3'-phosphate
  modified_base 20: mod_base = OTHER; note = 2'-deoxythymidine-3'-phosphorothioate
  misc_feature 1..19: note = RNA
  misc_feature 20..21: note = DNA
ggagctggtgctagccttgtt

SEQ ID NO: 88 - DNA, 21 bp, synthetic construct
  source 1..21: mol_type = other DNA
  modified_base 1: mod_base = OTHER; note = cytidine-3'-phosphate
  modified_base 2: mod_base = OTHER; note = adenosine-3'-phosphate
  modified_base 3: mod_base = OTHER; note = adenosine-3'-phosphate
  modified_base 4: mod_base = OTHER; note = guanosine-3'-phosphate
  modified_base 5: mod_base = OTHER; note = guanosine-3'-phosphate
  modified_base 6: mod_base = OTHER; note = cytidine-3'-phosphate
  modified_base 7: mod_base = OTHER; note = uridine-3'-phosphate
  modified_base 8: mod_base = OTHER; note = adenosine-3'-phosphate
  modified_base 9: mod_base = OTHER; note = guanosine-3'-phosphate
  modified_base 10: mod_base = OTHER; note = cytidine-3'-phosphate
  modified_base 11: mod_base = OTHER; note = adenosine-3'-phosphate
  modified_base 12: mod_base = OTHER; note = cytidine-3'-phosphate
  modified_base 13: mod_base = OTHER; note = cytidine-3'-phosphate
  modified_base 14: mod_base = OTHER; note = adenosine-3'-phosphate
  modified_base 15: mod_base = OTHER; note = guanosine-3'-phosphate
  modified_base 16: mod_base = OTHER; note = cytidine-3'-phosphate
  modified_base 17: mod_base = OTHER; note = uridine-3'-phosphate
  modified_base 18: mod_base = OTHER; note = cytidine-3'-phosphate
  modified_base 19: mod_base = OTHER; note = cytidine-3'-phosphate
  modified_base 20: mod_base = OTHER; note = 2'-deoxythymidine-3'-phosphorothioate
  misc_feature 1..19: note = RNA
  misc_feature 20..21: note = DNA
caaggctagcaccagctcctt

SEQ ID NO: 89 - DNA, 21 bp, synthetic construct
  source 1..21: mol_type = other DNA
  modified_base 1: mod_base = OTHER; note = guanosine-3'-phosphate
  modified_base 2: mod_base = OTHER; note = guanosine-3'-phosphate
  modified_base 3: mod_base = OTHER; note = adenosine-3'-phosphate
  modified_base 4: mod_base = OTHER; note = guanosine-3'-phosphate
  modified_base 5: mod_base = OTHER; note = 2'-O-methylcytidine-3'-phosphate
  modified_base 6: mod_base = OTHER; note = 2'-O-methyluridine-3'-phosphate
  modified_base 7: mod_base = OTHER; note = guanosine-3'-phosphate
  modified_base 8: mod_base = OTHER; note = guanosine-3'-phosphate
  modified_base 9: mod_base = OTHER; note = 2'-O-methyluridine-3'-phosphate
  modified_base 10: mod_base = OTHER; note = guanosine-3'-phosphate
  modified_base 11: mod_base = OTHER; note = 2'-O-methylcytidine-3'-phosphate
  modified_base 12: mod_base = OTHER; note = 2'-O-methyluridine-3'-phosphate
  modified_base 13: mod_base = OTHER; note = adenosine-3'-phosphate
  modified_base 14: mod_base = OTHER; note = guanosine-3'-phosphate
  modified_base 15: mod_base = OTHER; note = 2'-O-methylcytidine-3'-phosphate
  modified_base 16: mod_base = OTHER; note = 2'-O-methylcytidine-3'-phosphate
  modified_base 17: mod_base = OTHER; note = 2'-O-methyluridine-3'-phosphate
  modified_base 18: mod_base = OTHER; note = 2'-O-methyluridine-3'-phosphate
  modified_base 19: mod_base = OTHER; note = guanosine-3'-phosphate
  modified_base 20: mod_base = OTHER; note = 2'-deoxythymidine-3'-phosphorothioate
  misc_feature 1..19: note = RNA
  misc_feature 20..21: note = DNA
ggagctggtgctagccttgtt

SEQ ID NO: 90 - DNA, 21 bp, synthetic construct
  source 1..21: mol_type = other DNA
  modified_base 1: mod_base = OTHER; note = 2'-O-methylcytidine-3'-phosphate
  modified_base 2: mod_base = OTHER; note = adenosine-3'-phosphate
  modified_base 3: mod_base = OTHER; note = adenosine-3'-phosphate
  modified_base 4: mod_base = OTHER; note = guanosine-3'-phosphate
  modified_base 5: mod_base = OTHER; note = guanosine-3'-phosphate
  modified_base 6: mod_base = OTHER; note = cytidine-3'-phosphate
  modified_base 7: mod_base = OTHER; note = 2'-O-methyluridine-3'-phosphate
  modified_base 8: mod_base = OTHER; note = adenosine-3'-phosphate
  modified_base 9: mod_base = OTHER; note = guanosine-3'-phosphate
  modified_base 10: mod_base = OTHER; note = 2'-O-methylcytidine-3'-phosphate
  modified_base 11: mod_base = OTHER; note = adenosine-3'-phosphate
  modified_base 12: mod_base = OTHER; note = cytidine-3'-phosphate
  modified_base 13: mod_base = OTHER; note = 2'-O-methylcytidine-3'-phosphate
  modified_base 14: mod_base = OTHER; note = adenosine-3'-phosphate
  modified_base 15: mod_base = OTHER; note = guanosine-3'-phosphate
  modified_base 16: mod_base = OTHER; note = cytidine-3'-phosphate
  modified_base 17: mod_base = OTHER; note = uridine-3'-phosphate
  modified_base 18: mod_base = OTHER; note = cytidine-3'-phosphate
  modified_base 19: mod_base = OTHER; note = cytidine-3'-phosphate
  modified_base 20: mod_base = OTHER; note = 2'-deoxythymidine-3'-phosphorothioate
  misc_feature 1..19: note = RNA
  misc_feature 20..21: note = DNA
caaggctagcaccagctcctt

SEQ ID NO: 91 - DNA, 21 bp, synthetic construct
  source 1..21: mol_type = other DNA
  modified_base 1: mod_base = OTHER; note = guanosine-3'-phosphate
  modified_base 2: mod_base = OTHER; note = cytidine-3'-phosphate
  modified_base 3: mod_base = OTHER; note = uridine-3'-phosphate
  modified_base 4: mod_base = OTHER; note = guanosine-3'-phosphate
  modified_base 5: mod_base = OTHER; note = guanosine-3'-phosphate
  modified_base 6: mod_base = OTHER; note = uridine-3'-phosphate
  modified_base 7: mod_base = OTHER; note = guanosine-3'-phosphate
  modified_base 8: mod_base = OTHER; note = cytidine-3'-phosphate
  modified_base 9: mod_base = OTHER; note = uridine-3'-phosphate
  modified_base 10: mod_base = OTHER; note = adenosine-3'-phosphate
  modified_base 11: mod_base = OTHER; note = guanosine-3'-phosphate
  modified_base 12: mod_base = OTHER; note = cytidine-3'-phosphate
  modified_base 13: mod_base = OTHER; note = cytidine-3'-phosphate
  modified_base 14: mod_base = OTHER; note = uridine-3'-phosphate
  modified_base 15: mod_base = OTHER; note = uridine-3'-phosphate
  modified_base 16: mod_base = OTHER; note = guanosine-3'-phosphate
  modified_base 17: mod_base = OTHER; note = cytidine-3'-phosphate
  modified_base 18: mod_base = OTHER; note = guanosine-3'-phosphate
  modified_base 19: mod_base = OTHER; note = uridine-3'-phosphate
  modified_base 20: mod_base = OTHER; note = 2'-deoxythymidine-3'-phosphorothioate
  misc_feature 1..19: note = RNA
  misc_feature 20..21: note = DNA
gctggtgctagccttgcgttt

SEQ ID NO: 92 - DNA, 21 bp, synthetic construct
  source 1..21: mol_type = other DNA
  modified_base 1: mod_base = OTHER; note = adenosine-3'-phosphate
  modified_base 2: mod_base = OTHER; note = cytidine-3'-phosphate
  modified_base 3: mod_base = OTHER; note = guanosine-3'-phosphate
  modified_base 4: mod_base = OTHER; note = cytidine-3'-phosphate
  modified_base 5: mod_base = OTHER; note = adenosine-3'-phosphate
  modified_base 6: mod_base = OTHER; note = adenosine-3'-phosphate
  modified_base 7: mod_base = OTHER; note = guanosine-3'-phosphate
  modified_base 8: mod_base = OTHER; note = guanosine-3'-phosphate
  modified_base 9: mod_base = OTHER; note = cytidine-3'-phosphate
  modified_base 10: mod_base = OTHER; note = uridine-3'-phosphate
  modified_base 11: mod_base = OTHER; note = adenosine-3'-phosphate
  modified_base 12: mod_base = OTHER; note = guanosine-3'-phosphate
  modified_base 13: mod_base = OTHER; note = cytidine-3'-phosphate
  modified_base 14: mod_base = OTHER; note = adenosine-3'-phosphate
  modified_base 15: mod_base = OTHER; note = cytidine-3'-phosphate
  modified_base 16: mod_base = OTHER; note = cytidine-3'-phosphate
  modified_base 17: mod_base = OTHER; note = adenosine-3'-phosphate
  modified_base 18: mod_base = OTHER; note = guanosine-3'-phosphate
  modified_base 19: mod_base = OTHER; note = cytidine-3'-phosphate
  modified_base 20: mod_base = OTHER; note = 2'-deoxythymidine-3'-phosphorothioate
  misc_feature 1..19: note = RNA
  misc_feature 20..21: note = DNA
acgcaaggctagcaccagctt

SEQ ID NO: 93 - DNA, 21 bp, synthetic construct
  source 1..21: mol_type = other DNA
  modified_base 1: mod_base = OTHER; note = guanosine-3'-phosphate
  modified_base 2: mod_base = OTHER; note = 2'-O-methylcytidine-3'-phosphate
  modified_base 3: mod_base = OTHER; note = 2'-O-methyluridine-3'-phosphate
  modified_base 4: mod_base = OTHER; note = guanosine-3'-phosphate
  modified_base 5: mod_base = OTHER; note = guanosine-3'-phosphate
  modified_base 6: mod_base = OTHER; note = 2'-O-methyluridine-3'-phosphate
  modified_base 7: mod_base = OTHER; note = guanosine-3'-phosphate
  modified_base 8: mod_base = OTHER; note = 2'-O-methylcytidine-3'-phosphate
  modified_base 9: mod_base = OTHER; note = 2'-O-methyluridine-3'-phosphate
  modified_base 10: mod_base = OTHER; note = adenosine-3'-phosphate
  modified_base 11: mod_base = OTHER; note = guanosine-3'-phosphate
  modified_base 12: mod_base = OTHER; note = 2'-O-methylcytidine-3'-phosphate
  modified_base 13: mod_base = OTHER; note = 2'-O-methylcytidine-3'-phosphate
  modified_base 14: mod_base = OTHER; note = 2'-O-methyluridine-3'-phosphate
  modified_base 15: mod_base = OTHER; note = 2'-O-methyluridine-3'-phosphate
  modified_base 16: mod_base = OTHER; note = guanosine-3'-phosphate
  modified_base 17: mod_base = OTHER; note = 2'-O-methylcytidine-3'-phosphate
  modified_base 18: mod_base = OTHER; note = guanosine-3'-phosphate
  modified_base 19: mod_base = OTHER; note = 2'-O-methyluridine-3'-phosphate
  modified_base 20: mod_base = OTHER; note = 2'-deoxythymidine-3'-phosphorothioate
  misc_feature 1..19: note = RNA
  misc_feature 20..21: note = DNA
gctggtgctagccttgcgttt

SEQ ID NO: 94 - DNA, 21 bp, synthetic construct
  source 1..21: mol_type = other DNA
  modified_base 1: mod_base = OTHER; note = adenosine-3'-phosphate
  modified_base 2: mod_base = OTHER; note = cytidine-3'-phosphate
  modified_base 3: mod_base = OTHER; note = guanosine-3'-phosphate
  modified_base 4: mod_base = OTHER; note = 2'-O-methylcytidine-3'-phosphate
  modified_base 5: mod_base = OTHER; note = adenosine-3'-phosphate
  modified_base 6: mod_base = OTHER; note = adenosine-3'-phosphate
  modified_base 7: mod_base = OTHER; note = guanosine-3'-phosphate
  modified_base 8: mod_base = OTHER; note = guanosine-3'-phosphate
  modified_base 9: mod_base = OTHER; note = cytidine-3'-phosphate
  modified_base 10: mod_base = OTHER; note = 2'-O-methyluridine-3'-phosphate
  modified_base 11: mod_base = OTHER; note = adenosine-3'-phosphate
  modified_base 12: mod_base = OTHER; note = guanosine-3'-phosphate
  modified_base 13: mod_base = OTHER; note = 2'-O-methylcytidine-3'-phosphate
  modified_base 14: mod_base = OTHER; note = adenosine-3'-phosphate
  modified_base 15: mod_base = OTHER; note = cytidine-3'-phosphate
  modified_base 16: mod_base = OTHER; note = 2'-O-methylcytidine-3'-phosphate
  modified_base 17: mod_base = OTHER; note = adenosine-3'-phosphate
  modified_base 18: mod_base = OTHER; note = guanosine-3'-phosphate
  modified_base 19: mod_base = OTHER; note = cytidine-3'-phosphate
  modified_base 20: mod_base = OTHER; note = 2'-deoxythymidine-3'-phosphorothioate
  misc_feature 1..19: note = RNA
  misc_feature 20..21: note = DNA
acgcaaggctagcaccagctt

SEQ ID NO: 95 - DNA, 21 bp, synthetic construct
  source 1..21: mol_type = other DNA
  modified_base 1: mod_base = OTHER; note = cytidine-3'-phosphate
  modified_base 2: mod_base = OTHER; note = uridine-3'-phosphate
  modified_base 3: mod_base = OTHER; note = guanosine-3'-phosphate
  modified_base 4: mod_base = OTHER; note = guanosine-3'-phosphate
  modified_base 5: mod_base = OTHER; note = uridine-3'-phosphate
  modified_base 6: mod_base = OTHER; note = guanosine-3'-phosphate
  modified_base 7: mod_base = OTHER; note = cytidine-3'-phosphate
  modified_base 8: mod_base = OTHER; note = uridine-3'-phosphate
  modified_base 9: mod_base = OTHER; note = adenosine-3'-phosphate
  modified_base 10: mod_base = OTHER; note = guanosine-3'-phosphate
  modified_base 11: mod_base = OTHER; note = cytidine-3'-phosphate
  modified_base 12: mod_base = OTHER; note = cytidine-3'-phosphate
  modified_base 13: mod_base = OTHER; note = uridine-3'-phosphate
  modified_base 14: mod_base = OTHER; note = uridine-3'-phosphate
  modified_base 15: mod_base = OTHER; note = guanosine-3'-phosphate
  modified_base 16: mod_base = OTHER; note = cytidine-3'-phosphate
  modified_base 17: mod_base = OTHER; note = guanosine-3'-phosphate
  modified_base 18: mod_base = OTHER; note = uridine-3'-phosphate
  modified_base 19: mod_base = OTHER; note = uridine-3'-phosphate
  modified_base 20: mod_base = OTHER; note = 2'-deoxythymidine-3'-phosphorothioate
  misc_feature 1..19: note = RNA
  misc_feature 20..21: note = DNA
ctggtgctagccttgcgtttt

SEQ ID NO: 96 - DNA, 21 bp, synthetic construct
  source 1..21: mol_type = other DNA
  modified_base 1: mod_base = OTHER; note = adenosine-3'-phosphate
  modified_base 2: mod_base = OTHER; note = adenosine-3'-phosphate
  modified_base 3: mod_base = OTHER; note = cytidine-3'-phosphate
  modified_base 4: mod_base = OTHER; note = guanosine-3'-phosphate
  modified_base 5: mod_base = OTHER; note = cytidine-3'-phosphate
  modified_base 6: mod_base = OTHER; note = adenosine-3'-phosphate
  modified_base 7: mod_base = OTHER; note = adenosine-3'-phosphate
  modified_base 8: mod_base = OTHER; note = guanosine-3'-phosphate
  modified_base 9: mod_base = OTHER; note = guanosine-3'-phosphate
  modified_base 10: mod_base = OTHER; note = cytidine-3'-phosphate
  modified_base 11: mod_base = OTHER; note = uridine-3'-phosphate
  modified_base 12: mod_base = OTHER; note = adenosine-3'-phosphate
  modified_base 13: mod_base = OTHER; note = guanosine-3'-phosphate
  modified_base 14: mod_base = OTHER; note = cytidine-3'-phosphate
  modified_base 15: mod_base = OTHER; note = adenosine-3'-phosphate
  modified_base 16: mod_base = OTHER; note = cytidine-3'-phosphate
  modified_base 17: mod_base = OTHER; note = cytidine-3'-phosphate
  modified_base 18: mod_base = OTHER; note = adenosine-3'-phosphate
  modified_base 19: mod_base = OTHER; note = guanosine-3'-phosphate
  modified_base 20: mod_base = OTHER; note = 2'-deoxythymidine-3'-phosphorothioate
  misc_feature 1..19: note = RNA
  misc_feature 20..21: note = DNA
aacgcaaggctagcaccagtt

SEQ ID NO: 97 - DNA, 21 bp, synthetic construct
  source 1..21: mol_type = other DNA
  modified_base 1: mod_base = OTHER; note = cytidine-3'-phosphate
  modified_base 2: mod_base = OTHER; note = uridine-3'-phosphate
  modified_base 3: mod_base = OTHER; note = guanosine-3'-phosphate
  modified_base 4: mod_base = OTHER; note = guanosine-3'-phosphate
  modified_base 5: mod_base = OTHER; note = uridine-3'-phosphate
  modified_base 6: mod_base = OTHER; note = guanosine-3'-phosphate
  modified_base 7: mod_base = OTHER; note = cytidine-3'-phosphate
  modified_base 8: mod_base = OTHER; note = uridine-3'-phosphate
  modified_base 9: mod_base = OTHER; note = adenosine-3'-phosphate
  modified_base 10: mod_base = OTHER; note = guanosine-3'-phosphate
  modified_base 11: mod_base = OTHER; note = cytidine-3'-phosphate
  modified_base 12: mod_base = OTHER; note = cytidine-3'-phosphate
  modified_base 13: mod_base = OTHER; note = uridine-3'-phosphate
  modified_base 14: mod_base = OTHER; note = uridine-3'-phosphate
  modified_base 15: mod_base = OTHER; note = guanosine-3'-phosphate
  modified_base 16: mod_base = OTHER; note = cytidine-3'-phosphate
  modified_base 17: mod_base = OTHER; note = guanosine-3'-phosphate
  modified_base 18: mod_base = OTHER; note = uridine-3'-phosphate
  modified_base 19: mod_base = OTHER; note = uridine-3'-phosphate
  modified_base 20: mod_base = OTHER; note = 2'-deoxythymidine-3'-phosphorothioate
  misc_feature 1..19: note = RNA
  misc_feature 20..21: note = DNA
ctggtgctagccttgcgtttt

SEQ ID NO: 98 - DNA, 21 bp, synthetic construct
  source 1..21: mol_type = other DNA
  modified_base 1: mod_base = OTHER; note = adenosine-3'-phosphate
  modified_base 2: mod_base = OTHER; note = adenosine-3'-phosphate
  modified_base 3: mod_base = OTHER; note = cytidine-3'-phosphate
  modified_base 4: mod_base = OTHER; note = guanosine-3'-phosphate
  modified_base 5: mod_base = OTHER; note = cytidine-3'-phosphate
  modified_base 6: mod_base = OTHER; note = adenosine-3'-phosphate
  modified_base 7: mod_base = OTHER; note = adenosine-3'-phosphate
  modified_base 8: mod_base = OTHER; note = guanosine-3'-phosphate
  modified_base 9: mod_base = OTHER; note = guanosine-3'-phosphate
  modified_base 10: mod_base = OTHER; note = cytidine-3'-phosphate
  modified_base 11: mod_base = OTHER; note = uridine-3'-phosphate
  modified_base 12: mod_base = OTHER; note = adenosine-3'-phosphate
  modified_base 13: mod_base = OTHER; note = guanosine-3'-phosphate
  modified_base 14: mod_base = OTHER; note = cytidine-3'-phosphate
  modified_base 15: mod_base = OTHER; note = adenosine-3'-phosphate
  modified_base 16: mod_base = OTHER; note = cytidine-3'-phosphate
  modified_base 17: mod_base = OTHER; note = cytidine-3'-phosphate
  modified_base 18: mod_base = OTHER; note = adenosine-3'-phosphate
  modified_base 19: mod_base = OTHER; note = guanosine-3'-phosphate
  modified_base 20: mod_base = OTHER; note = 2'-deoxythymidine-3'-phosphorothioate
  misc_feature 1..19: note = RNA
  misc_feature 20..21: note = DNA
aacgcaaggctagcaccagtt

SEQ ID NO: 99 - DNA, 21 bp, synthetic construct
  source 1..21: mol_type = other DNA
  modified_base 1: mod_base = OTHER; note = 2'-O-methylcytidine-3'-phosphate
  modified_base 2: mod_base = OTHER; note = 2'-O-methyluridine-3'-phosphate
  modified_base 3: mod_base = OTHER; note = guanosine-3'-phosphate
  modified_base 4: mod_base = OTHER; note = guanosine-3'-phosphate
  modified_base 5: mod_base = OTHER; note = 2'-O-methyluridine-3'-phosphate
  modified_base 6: mod_base = OTHER; note = guanosine-3'-phosphate
  modified_base 7: mod_base = OTHER; note = 2'-O-methylcytidine-3'-phosphate
  modified_base 8: mod_base = OTHER; note = 2'-O-methyluridine-3'-phosphate
  modified_base 9: mod_base = OTHER; note = adenosine-3'-phosphate
  modified_base 10: mod_base = OTHER; note = guanosine-3'-phosphate
  modified_base 11: mod_base = OTHER; note = 2'-O-methylcytidine-3'-phosphate
  modified_base 12: mod_base = OTHER; note = 2'-O-methylcytidine-3'-phosphate
  modified_base 13: mod_base = OTHER; note = 2'-O-methyluridine-3'-phosphate
  modified_base 14: mod_base = OTHER; note = 2'-O-methyluridine-3'-phosphate
  modified_base 15: mod_base = OTHER; note = guanosine-3'-phosphate
  modified_base 16: mod_base = OTHER; note = 2'-O-methylcytidine-3'-phosphate
  modified_base 17: mod_base = OTHER; note = guanosine-3'-phosphate
  modified_base 18: mod_base = OTHER; note = 2'-O-methyluridine-3'-phosphate
  modified_base 19: mod_base = OTHER; note = 2'-O-methyluridine-3'-phosphate
  modified_base 20: mod_base = OTHER; note = 2'-deoxythymidine-3'-phosphorothioate
  misc_feature 1..19: note = RNA
  misc_feature 20..21: note = DNA
ctggtgctagccttgcgtttt

SEQ ID NO: 100 - DNA, 21 bp, synthetic construct
  source 1..21: mol_type = other DNA
  modified_base 1: mod_base = OTHER; note = adenosine-3'-phosphate
  modified_base 2: mod_base = OTHER; note = adenosine-3'-phosphate
  modified_base 3: mod_base = OTHER; note = cytidine-3'-phosphate
  modified_base 4: mod_base = OTHER; note = guanosine-3'-phosphate
  modified_base 5: mod_base = OTHER; note = 2'-O-methylcytidine-3'-phosphate
  modified_base 6: mod_base = OTHER; note = adenosine-3'-phosphate
  modified_base 7: mod_base = OTHER; note = adenosine-3'-phosphate
  modified_base 8: mod_base = OTHER; note = guanosine-3'-phosphate
  modified_base 9: mod_base = OTHER; note = guanosine-3'-phosphate
  modified_base 10: mod_base = OTHER; note = cytidine-3'-phosphate
  modified_base 11: mod_base = OTHER; note = 2'-O-methyluridine-3'-phosphate
  modified_base 12: mod_base = OTHER; note = adenosine-3'-phosphate
  modified_base 13: mod_base = OTHER; note = guanosine-3'-phosphate
  modified_base 14: mod_base = OTHER; note = 2'-O-methylcytidine-3'-phosphate
  modified_base 15: mod_base = OTHER; note = adenosine-3'-phosphate
  modified_base 16: mod_base = OTHER; note = cytidine-3'-phosphate
  modified_base 17: mod_base = OTHER; note = 2'-O-methylcytidine-3'-phosphate
  modified_base 18: mod_base = OTHER; note = adenosine-3'-phosphate
  modified_base 19: mod_base = OTHER; note = guanosine-3'-phosphate
  modified_base 20: mod_base = OTHER; note = 2'-deoxythymidine-3'-phosphorothioate
  misc_feature 1..19: note = RNA
  misc_feature 20..21: note = DNA
aacgcaaggctagcaccagtt

SEQ ID NO: 101 - DNA, 21 bp, synthetic construct
  source 1..21: mol_type = other DNA
  modified_base 1: mod_base = OTHER; note = uridine-3'-phosphate
  modified_base 2: mod_base = OTHER; note = guanosine-3'-phosphate
  modified_base 3: mod_base = OTHER; note = cytidine-3'-phosphate
  modified_base 4: mod_base = OTHER; note = uridine-3'-phosphate
  modified_base 5: mod_base = OTHER; note = adenosine-3'-phosphate
  modified_base 6: mod_base = OTHER; note = guanosine-3'-phosphate
  modified_base 7: mod_base = OTHER; note = cytidine-3'-phosphate
  modified_base 8: mod_base = OTHER; note = cytidine-3'-phosphate
  modified_base 9: mod_base = OTHER; note = uridine-3'-phosphate
  modified_base 10: mod_base = OTHER; note = uridine-3'-phosphate
  modified_base 11: mod_base = OTHER; note = guanosine-3'-phosphate
  modified_base 12: mod_base = OTHER; note = cytidine-3'-phosphate
  modified_base 13: mod_base = OTHER; note = guanosine-3'-phosphate
  modified_base 14: mod_base = OTHER; note = uridine-3'-phosphate
  modified_base 15: mod_base = OTHER; note = uridine-3'-phosphate
  modified_base 16: mod_base = OTHER; note = cytidine-3'-phosphate
  modified_base 17: mod_base = OTHER; note = cytidine-3'-phosphate
  modified_base 18: mod_base = OTHER; note = guanosine-3'-phosphate
  modified_base 19: mod_base = OTHER; note = adenosine-3'-phosphate
  modified_base 20: mod_base = OTHER; note = 2'-deoxythymidine-3'-phosphorothioate
  misc_feature 1..19: note = RNA
  misc_feature 20..21: note = DNA
tgctagccttgcgttccgatt

SEQ ID NO: 102 - DNA, 21 bp, synthetic construct
  source 1..21: mol_type = other DNA
  modified_base 1: mod_base = OTHER; note = uridine-3'-phosphate
  modified_base 2: mod_base = OTHER; note = cytidine-3'-phosphate
  modified_base 3: mod_base = OTHER; note = guanosine-3'-phosphate
  modified_base 4: mod_base = OTHER; note = guanosine-3'-phosphate
  modified_base 5: mod_base = OTHER; note = adenosine-3'-phosphate
  modified_base 6: mod_base = OTHER; note = adenosine-3'-phosphate
  modified_base 7: mod_base = OTHER; note = cytidine-3'-phosphate
  modified_base 8: mod_base = OTHER; note = guanosine-3'-phosphate
  modified_base 9: mod_base = OTHER; note = cytidine-3'-phosphate
  modified_base 10: mod_base = OTHER; note = adenosine-3'-phosphate
  modified_base 11: mod_base = OTHER; note = adenosine-3'-phosphate
  modified_base 12: mod_base = OTHER; note = guanosine-3'-phosphate
  modified_base 13: mod_base = OTHER; note = guanosine-3'-phosphate
  modified_base 14: mod_base = OTHER; note = cytidine-3'-phosphate
  modified_base 15: mod_base = OTHER; note = uridine-3'-phosphate
  modified_base 16: mod_base = OTHER; note = adenosine-3'-phosphate
  modified_base 17: mod_base = OTHER; note = guanosine-3'-phosphate
  modified_base 18: mod_base = OTHER; note = cytidine-3'-phosphate
  modified_base 19: mod_base = OTHER; note = adenosine-3'-phosphate
  modified_base 20: mod_base = OTHER; note = 2'-deoxythymidine-3'-phosphorothioate
  misc_feature 1..19: note = RNA
  misc_feature 20..21: note = DNA
tcggaacgcaaggctagcatt

SEQ ID NO: 103 - DNA, 21 bp, synthetic construct
  source 1..21: mol_type = other DNA
  modified_base 1: mod_base = OTHER; note = 2'-O-methyluridine-3'-phosphate
  modified_base 2: mod_base = OTHER; note = guanosine-3'-phosphate
  modified_base 3: mod_base = OTHER; note = 2'-O-methylcytidine-3'-phosphate
  modified_base 4: mod_base = OTHER; note = 2'-O-methyluridine-3'-phosphate
  modified_base 5: mod_base = OTHER; note = adenosine-3'-phosphate
  modified_base 6: mod_base = OTHER; note = guanosine-3'-phosphate
  modified_base 7: mod_base = OTHER; note = 2'-O-methylcytidine-3'-phosphate
  modified_base 8: mod_base = OTHER; note = 2'-O-methylcytidine-3'-phosphate
  modified_base 9: mod_base = OTHER; note = 2'-O-methyluridine-3'-phosphate
  modified_base 10: mod_base = OTHER; note = 2'-O-methyluridine-3'-phosphate
  modified_base 11: mod_base = OTHER; note = guanosine-3'-phosphate
  modified_base 12: mod_base = OTHER; note = 2'-O-methylcytidine-3'-phosphate
  modified_base 13: mod_base = OTHER; note = guanosine-3'-phosphate
  modified_base 14: mod_base = OTHER; note = 2'-O-methyluridine-3'-phosphate
  modified_base 15: mod_base = OTHER; note = 2'-O-methyluridine-3'-phosphate
  modified_base 16: mod_base = OTHER; note = 2'-O-methylcytidine-3'-phosphate
  modified_base 17: mod_base = OTHER; note = 2'-O-methylcytidine-3'-phosphate
  modified_base 18: mod_base = OTHER; note = guanosine-3'-phosphate
  modified_base 19: mod_base = OTHER; note = adenosine-3'-phosphate
  modified_base 20: mod_base = OTHER; note = 2'-deoxythymidine-3'-phosphorothioate
  misc_feature 1..19: note = RNA
  misc_feature 20..21: note = DNA
tgctagccttgcgttccgatt

SEQ ID NO: 104 - DNA, 21 bp, synthetic construct
  source 1..21: mol_type = other DNA
  modified_base 1: mod_base = OTHER; note = uridine-3'-phosphate
  modified_base 2: mod_base = OTHER; note = cytidine-3'-phosphate
  modified_base 3: mod_base = OTHER; note = guanosine-3'-phosphate
  modified_base 4: mod_base = OTHER; note = guanosine-3'-phosphate
  modified_base 5: mod_base = OTHER; note = adenosine-3'-phosphate
  modified_base 6: mod_base = OTHER; note = adenosine-3'-phosphate
  modified_base 7: mod_base = OTHER; note = cytidine-3'-phosphate
  modified_base 8: mod_base = OTHER; note = guanosine-3'-phosphate
  modified_base 9: mod_base = OTHER; note = 2'-O-methylcytidine-3'-phosphate
  modified_base 10: mod_base = OTHER; note = adenosine-3'-phosphate
  modified_base 11: mod_base = OTHER; note = adenosine-3'-phosphate
  modified_base 12: mod_base = OTHER; note = guanosine-3'-phosphate
  modified_base 13: mod_base = OTHER; note = guanosine-3'-phosphate
  modified_base 14: mod_base = OTHER; note = cytidine-3'-phosphate
  modified_base 15: mod_base = OTHER; note = 2'-O-methyluridine-3'-phosphate
  modified_base 16: mod_base = OTHER; note = adenosine-3'-phosphate
  modified_base 17: mod_base = OTHER; note = guanosine-3'-phosphate
  modified_base 18: mod_base = OTHER; note = 2'-O-methylcytidine-3'-phosphate
  modified_base 19: mod_base = OTHER; note = adenosine-3'-phosphate
  modified_base 20: mod_base = OTHER; note = 2'-deoxythymidine-3'-phosphorothioate
  misc_feature 1..19: note = RNA
  misc_feature 20..21: note = DNA
tcggaacgcaaggctagcatt

SEQ ID NO: 105 - DNA, 21 bp, synthetic construct
  source 1..21: mol_type = other DNA
  modified_base 1: mod_base = OTHER; note = uridine-3'-phosphate
  modified_base 2: mod_base = OTHER; note = adenosine-3'-phosphate
  modified_base 3: mod_base = OTHER; note = guanosine-3'-phosphate
  modified_base 4: mod_base = OTHER; note = cytidine-3'-phosphate
  modified_base 5: mod_base = OTHER; note = cytidine-3'-phosphate
  modified_base 6: mod_base = OTHER; note = uridine-3'-phosphate
  modified_base 7: mod_base = OTHER; note = uridine-3'-phosphate
  modified_base 8: mod_base = OTHER; note = guanosine-3'-phosphate
  modified_base 9: mod_base = OTHER; note = cytidine-3'-phosphate
  modified_base 10: mod_base = OTHER; note = guanosine-3'-phosphate
  modified_base 11: mod_base = OTHER; note = uridine-3'-phosphate
  modified_base 12: mod_base = OTHER; note = uridine-3'-phosphate
  modified_base 13: mod_base = OTHER; note = cytidine-3'-phosphate
  modified_base 14: mod_base = OTHER; note = cytidine-3'-phosphate
  modified_base 15: mod_base = OTHER; note = guanosine-3'-phosphate
  modified_base 16: mod_base = OTHER; note = adenosine-3'-phosphate
  modified_base 17: mod_base = OTHER; note = guanosine-3'-phosphate
  modified_base 18: mod_base = OTHER; note = guanosine-3'-phosphate
  modified_base 19: mod_base = OTHER; note = adenosine-3'-phosphate
  modified_base 20: mod_base = OTHER; note = 2'-deoxythymidine-3'-phosphorothioate
  misc_feature 1..19: note = RNA
  misc_feature 20..21: note = DNA
tagccttgcgttccgaggatt

SEQ ID NO: 106 - DNA, 21 bp, synthetic construct
  source 1..21: mol_type = other DNA
  modified_base 1: mod_base = OTHER; note = uridine-3'-phosphate
  modified_base 2: mod_base = OTHER; note = cytidine-3'-phosphate
  modified_base 3: mod_base = OTHER; note = cytidine-3'-phosphate
  modified_base 4: mod_base = OTHER; note = uridine-3'-phosphate
  modified_base 5: mod_base = OTHER; note = cytidine-3'-phosphate
  modified_base 6: mod_base = OTHER; note = guanosine-3'-phosphate
  modified_base 7: mod_base = OTHER; note = guanosine-3'-phosphate
  modified_base 8: mod_base = OTHER; note = adenosine-3'-phosphate
  modified_base 9: mod_base = OTHER; note = adenosine-3'-phosphate
  modified_base 10: mod_base = OTHER; note = cytidine-3'-phosphate
  modified_base 11: mod_base = OTHER; note = guanosine-3'-phosphate
  modified_base 12: mod_base = OTHER; note = cytidine-3'-phosphate
  modified_base 13: mod_base = OTHER; note = adenosine-3'-phosphate
  modified_base 14: mod_base = OTHER; note = adenosine-3'-phosphate
  modified_base 15: mod_base = OTHER; note = guanosine-3'-phosphate
  modified_base 16: mod_base = OTHER; note = guanosine-3'-phosphate
  modified_base 17: mod_base = OTHER; note = cytidine-3'-phosphate
  modified_base 18: mod_base = OTHER; note = uridine-3'-phosphate
  modified_base 19: mod_base = OTHER; note = adenosine-3'-phosphate
  modified_base 20: mod_base = OTHER; note = 2'-deoxythymidine-3'-phosphorothioate
  misc_feature 1..19: note = RNA
  misc_feature 20..21: note = DNA
tcctcggaacgcaaggctatt

SEQ ID NO: 107 - DNA, 21 bp, synthetic construct
  source 1..21: mol_type = other DNA
  modified_base 1: mod_base = OTHER; note = 2'-O-methyluridine-3'-phosphate
  modified_base 2: mod_base = OTHER; note = adenosine-3'-phosphate
  modified_base 3: mod_base = OTHER; note = guanosine-3'-phosphate
  modified_base 4: mod_base = OTHER; note = 2'-O-methylcytidine-3'-phosphate
  modified_base 5: mod_base = OTHER; note = 2'-O-methylcytidine-3'-phosphate
  modified_base 6: mod_base = OTHER; note = 2'-O-methyluridine-3'-phosphate
  modified_base 7: mod_base = OTHER; note = 2'-O-methyluridine-3'-phosphate
  modified_base 8: mod_base = OTHER; note = guanosine-3'-phosphate
  modified_base 9: mod_base = OTHER; note = 2'-O-methylcytidine-3'-phosphate
  modified_base 10: mod_base = OTHER; note = guanosine-3'-phosphate
  modified_base 11: mod_base = OTHER; note = 2'-O-methyluridine-3'-phosphate
  modified_base 12: mod_base = OTHER; note = 2'-O-methyluridine-3'-phosphate
  modified_base 13: mod_base = OTHER; note = 2'-O-methylcytidine-3'-phosphate
  modified_base 14: mod_base = OTHER; note = 2'-O-methylcytidine-3'-phosphate
  modified_base 15: mod_base = OTHER; note = guanosine-3'-phosphate
  modified_base 16: mod_base = OTHER; note = adenosine-3'-phosphate
  modified_base 17: mod_base = OTHER; note = guanosine-3'-phosphate
  modified_base 18: mod_base = OTHER; note = guanosine-3'-phosphate
  modified_base 19: mod_base = OTHER; note = adenosine-3'-phosphate
  modified_base 20: mod_base = OTHER; note = 2'-deoxythymidine-3'-phosphorothioate
  misc_feature 1..19: note = RNA
  misc_feature 20..21: note = DNA
tagccttgcgttccgaggatt

SEQ ID NO: 108 - DNA, 21 bp, synthetic construct
  source 1..21: mol_type = other DNA
  modified_base 1: mod_base = OTHER; note = uridine-3'-phosphate
  modified_base 2: mod_base = OTHER; note = cytidine-3'-phosphate
  modified_base 3: mod_base = OTHER; note = cytidine-3'-phosphate
  modified_base 4: mod_base = OTHER; note = uridine-3'-phosphate
  modified_base 5: mod_base = OTHER; note = cytidine-3'-phosphate
  modified_base 6: mod_base = OTHER; note = guanosine-3'-phosphate
  modified_base 7: mod_base = OTHER; note = guanosine-3'-phosphate
  modified_base 8: mod_base = OTHER; note = adenosine-3'-phosphate
  modified_base 9: mod_base = OTHER; note = adenosine-3'-phosphate
  modified_base 10: mod_base = OTHER; note = cytidine-3'-phosphate
  modified_base 11: mod_base = OTHER; note = guanosine-3'-phosphate
  modified_base 12: mod_base = OTHER; note = 2'-O-methylcytidine-3'-phosphate
  modified_base 13: mod_base = OTHER; note = adenosine-3'-phosphate
  modified_base 14: mod_base = OTHER; note = adenosine-3'-phosphate
  modified_base 15: mod_base = OTHER; note = guanosine-3'-phosphate
  modified_base 16: mod_base = OTHER; note = guanosine-3'-phosphate
  modified_base 17: mod_base = OTHER; note = cytidine-3'-phosphate
  modified_base 18: mod_base = OTHER; note = 2'-O-methyluridine-3'-phosphate
  modified_base 19: mod_base = OTHER; note = adenosine-3'-phosphate
  modified_base 20: mod_base = OTHER; note = 2'-deoxythymidine-3'-phosphorothioate
  misc_feature 1..19: note = RNA
  misc_feature 20..21: note = DNA
tcctcggaacgcaaggctatt

SEQ ID NO: 109 - DNA, 21 bp, synthetic construct
  source 1..21: mol_type = other DNA
  modified_base 1: mod_base = OTHER; note = guanosine-3'-phosphate
  modified_base 2: mod_base = OTHER; note = adenosine-3'-phosphate
  modified_base 3: mod_base = OTHER; note = cytidine-3'-phosphate
  modified_base 4: mod_base = OTHER; note = guanosine-3'-phosphate
  modified_base 5: mod_base = OTHER; note = guanosine-3'-phosphate
  modified_base 6: mod_base = OTHER; note = cytidine-3'-phosphate
  modified_base 7: mod_base = OTHER; note = cytidine-3'-phosphate
  modified_base 8: mod_base = OTHER; note = uridine-3'-phosphate
  modified_base 9: mod_base = OTHER; note = guanosine-3'-phosphate
  modified_base 10: mod_base = OTHER; note = guanosine-3'-phosphate
  modified_base 11: mod_base = OTHER; note = cytidine-3'-phosphate
  modified_base 12: mod_base = OTHER; note = cytidine-3'-phosphate
  modified_base 13: mod_base = OTHER; note = guanosine-3'-phosphate
  modified_base 14: mod_base = OTHER; note = adenosine-3'-phosphate
  modified_base 15: mod_base = OTHER; note = adenosine-3'-phosphate
  modified_base 16: mod_base = OTHER; note = guanosine-3'-phosphate
  modified_base 17: mod_base = OTHER; note = cytidine-3'-phosphate
  modified_base 18: mod_base = OTHER; note = adenosine-3'-phosphate
  modified_base 19: mod_base = OTHER; note = cytidine-3'-phosphate
  misc_feature 1..19: note = RNA
  misc_feature 20..21: note = DNA
gacggcctggccgaagcactt

SEQ ID NO: 110 - DNA, 21 bp, synthetic construct
  source 1..21: mol_type = other DNA
  modified_base 1: mod_base = OTHER; note = guanosine-3'-phosphate
  modified_base 2: mod_base = OTHER; note = uridine-3'-phosphate
  modified_base 3: mod_base = OTHER; note = guanosine-3'-phosphate
  modified_base 4: mod_base = OTHER; note = cytidine-3'-phosphate
  modified_base 5: mod_base = OTHER; note = uridine-3'-phosphate
  modified_base 6: mod_base = OTHER; note = uridine-3'-phosphate
  modified_base 7: mod_base = OTHER; note = cytidine-3'-phosphate
  modified_base 8: mod_base = OTHER; note = guanosine-3'-phosphate
  modified_base 9: mod_base = OTHER; note = guanosine-3'-phosphate
  modified_base 10: mod_base = OTHER; note = cytidine-3'-phosphate
  modified_base 11: mod_base = OTHER; note = cytidine-3'-phosphate
  modified_base 12: mod_base = OTHER; note = adenosine-3'-phosphate
  modified_base 13: mod_base = OTHER; note = guanosine-3'-phosphate
  modified_base 14: mod_base = OTHER; note = guanosine-3'-phosphate
  modified_base 15: mod_base = OTHER; note = cytidine-3'-phosphate
  modified_base 16: mod_base = OTHER; note = cytidine-3'-phosphate
  modified_base 17: mod_base = OTHER; note = guanosine-3'-phosphate
  modified_base 18: mod_base = OTHER; note = uridine-3'-phosphate
  modified_base 19: mod_base = OTHER; note = cytidine-3'-phosphate
  misc_feature 1..19: note = RNA
  misc_feature 20..21: note = DNA
gtgcttcggccaggccgtctt

SEQ ID NO: 111 - DNA, 21 bp, synthetic construct
  source 1..21: mol_type = other DNA
  modified_base 1: mod_base = OTHER; note = guanosine-3'-phosphate
  modified_base 2: mod_base = OTHER; note = guanosine-3'-phosphate
  modified_base 3: mod_base = OTHER; note = cytidine-3'-phosphate
  modified_base 4: mod_base = OTHER; note = cytidine-3'-phosphate
  modified_base 5: mod_base = OTHER; note = guanosine-3'-phosphate
  modified_base 6: mod_base = OTHER; note = adenosine-3'-phosphate
  modified_base 7: mod_base = OTHER; note = adenosine-3'-phosphate
  modified_base 8: mod_base = OTHER; note = guanosine-3'-phosphate
  modified_base 9: mod_base = OTHER; note = cytidine-3'-phosphate
  modified_base 10: mod_base = OTHER; note = adenosine-3'-phosphate
  modified_base 11: mod_base = OTHER; note = cytidine-3'-phosphate
  modified_base 12: mod_base = OTHER; note = cytidine-3'-phosphate
  modified_base 13: mod_base = OTHER; note = cytidine-3'-phosphate
  modified_base 14: mod_base = OTHER; note = guanosine-3'-phosphate
  modified_base 15: mod_base = OTHER; note = adenosine-3'-phosphate
  modified_base 16: mod_base = OTHER; note = guanosine-3'-phosphate
  modified_base 17: mod_base = OTHER; note = cytidine-3'-phosphate
  modified_base 18: mod_base = OTHER; note = adenosine-3'-phosphate
  modified_base 19: mod_base = OTHER; note = cytidine-3'-phosphate
  misc_feature 1..19: note = RNA
  misc_feature 20..21: note = DNA
ggccgaagcacccgagcactt

SEQ ID NO: 112 - DNA, 21 bp, synthetic construct
  source 1..21: mol_type = other DNA
  modified_base 1: mod_base = OTHER; note = guanosine-3'-phosphate
  modified_base 2: mod_base = OTHER; note = uridine-3'-phosphate
  modified_base 3: mod_base = OTHER; note = guanosine-3'-phosphate
  modified_base 4: mod_base = OTHER; note = cytidine-3'-phosphate
  modified_base 5: mod_base = OTHER; note = uridine-3'-phosphate
  modified_base 6: mod_base = OTHER; note = cytidine-3'-phosphate
  modified_base 7: mod_base = OTHER; note = guanosine-3'-phosphate
  modified_base 8: mod_base = OTHER; note = guanosine-3'-phosphate
  modified_base 9: mod_base = OTHER; note = guanosine-3'-phosphate
  modified_base 10: mod_base = OTHER; note = uridine-3'-phosphate
  modified_base 11: mod_base = OTHER; note = guanosine-3'-phosphate
  modified_base 12: mod_base = OTHER; note = cytidine-3'-phosphate
  modified_base 13: mod_base = OTHER; note = uridine-3'-phosphate
  modified_base 14: mod_base = OTHER; note = uridine-3'-phosphate
  modified_base 15: mod_base = OTHER; note = cytidine-3'-phosphate
  modified_base 16: mod_base = OTHER; note = guanosine-3'-phosphate
  modified_base 17: mod_base = OTHER; note = guanosine-3'-phosphate
  modified_base 18: mod_base = OTHER; note = cytidine-3'-phosphate
  modified_base 19: mod_base = OTHER; note = cytidine-3'-phosphate
  misc_feature 1..19: note = RNA
  misc_feature 20..21: note = DNA
gtgctcgggtgcttcggcctt

SEQ ID NO: 113 - DNA, 21 bp, synthetic construct
  source 1..21: mol_type = other DNA
  modified_base 1: mod_base = OTHER; note = guanosine-3'-phosphate
  modified_base 2: mod_base = OTHER; note = cytidine-3'-phosphate
  modified_base 3: mod_base = OTHER; note = cytidine-3'-phosphate
  modified_base 4: mod_base = OTHER; note = guanosine-3'-phosphate
  modified_base 5: mod_base = OTHER; note = adenosine-3'-phosphate
  modified_base 6: mod_base = OTHER; note = adenosine-3'-phosphate
  modified_base 7: mod_base = OTHER; note = guanosine-3'-phosphate
  modified_base 8: mod_base = OTHER; note = cytidine-3'-phosphate
  modified_base 9: mod_base = OTHER; note = adenosine-3'-phosphate
  modified_base 10: mod_base = OTHER; note = cytidine-3'-phosphate
  modified_base 11: mod_base = OTHER; note = cytidine-3'-phosphate
  modified_base 12: mod_base = OTHER; note = cytidine-3'-phosphate
  modified_base 13: mod_base = OTHER; note = guanosine-3'-phosphate
  modified_base 14: mod_base = OTHER; note = adenosine-3'-phosphate
  modified_base 15: mod_base = OTHER; note = guanosine-3'-phosphate
  modified_base 16: mod_base = OTHER; note = cytidine-3'-phosphate
  modified_base 17: mod_base = OTHER; note = adenosine-3'-phosphate
  modified_base 18: mod_base = OTHER; note = cytidine-3'-phosphate
  modified_base 19: mod_base = OTHER; note = guanosine-3'-phosphate
  misc_feature 1..19: note = RNA
  misc_feature 20..21: note = DNA
gccgaagcacccgagcacgtt

SEQ ID NO: 114 - DNA, 21 bp, synthetic construct
  source 1..21: mol_type = other DNA
  modified_base 1: mod_base = OTHER; note = cytidine-3'-phosphate
  modified_base 2: mod_base = OTHER; note = guanosine-3'-phosphate
  modified_base 3: mod_base = OTHER; note = uridine-3'-phosphate
  modified_base 4: mod_base = OTHER; note = guanosine-3'-phosphate
  modified_base 5: mod_base = OTHER; note = cytidine-3'-phosphate
  modified_base 6: mod_base = OTHER; note = uridine-3'-phosphate
  modified_base 7: mod_base = OTHER; note = cytidine-3'-phosphate
  modified_base 8: mod_base = OTHER; note = guanosine-3'-phosphate
  modified_base 9: mod_base = OTHER; note = guanosine-3'-phosphate
  modified_base 10: mod_base = OTHER; note = guanosine-3'-phosphate
  modified_base 11: mod_base = OTHER; note = uridine-3'-phosphate
  modified_base 12: mod_base = OTHER; note = guanosine-3'-phosphate
  modified_base 13: mod_base = OTHER; note = cytidine-3'-phosphate
  modified_base 14: mod_base = OTHER; note = uridine-3'-phosphate
  modified_base 15: mod_base = OTHER; note = uridine-3'-phosphate
  modified_base 16: mod_base = OTHER; note = cytidine-3'-phosphate
  modified_base 17: mod_base = OTHER; note = guanosine-3'-phosphate
  modified_base 18: mod_base = OTHER; note = guanosine-3'-phosphate
  modified_base 19: mod_base = OTHER; note = cytidine-3'-phosphate
  misc_feature 1..19: note = RNA
  misc_feature 20..21: note = DNA
cgtgctcgggtgcttcggctt

SEQ ID NO: 115 - DNA, 21 bp, synthetic construct
  source 1..21: mol_type = other DNA
  modified_base 1: mod_base = OTHER; note = cytidine-3'-phosphate
  modified_base 2: mod_base = OTHER; note = cytidine-3'-phosphate
  modified_base 3: mod_base = OTHER; note = guanosine-3'-phosphate
  modified_base 4: mod_base = OTHER; note = adenosine-3'-phosphate
  modified_base 5: mod_base = OTHER; note = adenosine-3'-phosphate
  modified_base 6: mod_base = OTHER; note = guanosine-3'-phosphate
  modified_base 7: mod_base = OTHER; note = cytidine-3'-phosphate
  modified_base 8: mod_base = OTHER; note = adenosine-3'-phosphate
  modified_base 9: mod_base = OTHER; note = cytidine-3'-phosphate
  modified_base 10: mod_base = OTHER; note = cytidine-3'-phosphate
  modified_base 11: mod_base = OTHER; note = cytidine-3'-phosphate
  modified_base 12: mod_base = OTHER; note = guanosine-3'-phosphate
  modified_base 13: mod_base = OTHER; note = adenosine-3'-phosphate
  modified_base 14: mod_base = OTHER; note = guanosine-3'-phosphate
  modified_base 15: mod_base = OTHER; note = cytidine-3'-phosphate
  modified_base 16: mod_base = OTHER; note = adenosine-3'-phosphate
  modified_base 17: mod_base = OTHER; note = cytidine-3'-phosphate
  modified_base 18: mod_base = OTHER; note = guanosine-3'-phosphate
  modified_base 19: mod_base = OTHER; note = guanosine-3'-phosphate
  misc_feature 1..19: note = RNA
  misc_feature 20..21: note = DNA
ccgaagcacccgagcacggtt

SEQ ID NO: 116 - DNA, 21 bp, synthetic construct
  source 1..21: mol_type = other DNA
  modified_base 1: mod_base = OTHER; note = cytidine-3'-phosphate
  modified_base 2: mod_base = OTHER; note = cytidine-3'-phosphate
  modified_base 3: mod_base = OTHER; note = guanosine-3'-phosphate
  modified_base 4: mod_base = OTHER; note = uridine-3'-phosphate
  modified_base 5: mod_base = OTHER; note = guanosine-3'-phosphate
  modified_base 6: mod_base = OTHER; note = cytidine-3'-phosphate
  modified_base 7: mod_base = OTHER; note = uridine-3'-phosphate
  modified_base 8: mod_base = OTHER; note = cytidine-3'-phosphate
  modified_base 9: mod_base = OTHER; note = guanosine-3'-phosphate
  modified_base 10: mod_base = OTHER; note = guanosine-3'-phosphate
  modified_base 11: mod_base = OTHER; note = guanosine-3'-phosphate
  modified_base 12: mod_base = OTHER; note = uridine-3'-phosphate
  modified_base 13: mod_base = OTHER; note = guanosine-3'-phosphate
  modified_base 14: mod_base = OTHER; note = cytidine-3'-phosphate
  modified_base 15: mod_base = OTHER; note = uridine-3'-phosphate
  modified_base 16: mod_base = OTHER; note = uridine-3'-phosphate
  modified_base 17: mod_base = OTHER; note = cytidine-3'-phosphate
  modified_base 18: mod_base = OTHER; note = guanosine-3'-phosphate
  modified_base 19: mod_base = OTHER; note = guanosine-3'-phosphate
  misc_feature 1..19: note = RNA
  misc_feature 20..21: note = DNA
ccgtgctcgggtgcttcggtt

SEQ ID NO: 117 - DNA, 21 bp, synthetic construct
  source 1..21: mol_type = other DNA
  modified_base 1: mod_base = OTHER; note = cytidine-3'-phosphate
  modified_base 2: mod_base = OTHER; note = cytidine-3'-phosphate
  modified_base 3: mod_base = OTHER; note = guanosine-3'-phosphate
  modified_base 4: mod_base = OTHER; note = adenosine-3'-phosphate
  modified_base 5: mod_base = OTHER; note = guanosine-3'-phosphate
  modified_base 6: mod_base = OTHER; note = cytidine-3'-phosphate
  modified_base 7: mod_base = OTHER; note = adenosine-3'-phosphate
  modified_base 8: mod_base = OTHER; note = cytidine-3'-phosphate
  modified_base 9: mod_base = OTHER; note = guanosine-3'-phosphate
  modified_base 10: mod_base = OTHER; note = guanosine-3'-phosphate
  modified_base 11: mod_base = OTHER; note = adenosine-3'-phosphate
  modified_base 12: mod_base = OTHER; note = adenosine-3'-phosphate
  modified_base 13: mod_base = OTHER; note = cytidine-3'-phosphate
  modified_base 14: mod_base = OTHER; note = cytidine-3'-phosphate
  modified_base 15: mod_base = OTHER; note = adenosine-3'-phosphate
  modified_base 16: mod_base = OTHER; note = cytidine-3'-phosphate
  modified_base 17: mod_base = OTHER; note = adenosine-3'-phosphate
  modified_base 18: mod_base = OTHER; note = guanosine-3'-phosphate
  modified_base 19: mod_base = OTHER; note = cytidine-3'-phosphate
  misc_feature 1..19: note = RNA
  misc_feature 20..21: note = DNA
ccgagcacggaaccacagctt

SEQ ID NO: 118 - DNA, 21 bp, synthetic construct
  source 1..21: mol_type = other DNA
  modified_base 1: mod_base = OTHER; note = guanosine-3'-phosphate
  modified_base 2: mod_base = OTHER; note = cytidine-3'-phosphate
  modified_base 3: mod_base = OTHER; note = uridine-3'-phosphate
  modified_base 4: mod_base = OTHER; note = guanosine-3'-phosphate
  modified_base 5: mod_base = OTHER; note = uridine-3'-phosphate
  modified_base 6: mod_base = OTHER; note = guanosine-3'-phosphate
  modified_base 7: mod_base = OTHER; note = guanosine-3'-phosphate
  modified_base 8: mod_base = OTHER; note = uridine-3'-phosphate
  modified_base 9: mod_base = OTHER; note = uridine-3'-phosphate
  modified_base 10: mod_base = OTHER; note = cytidine-3'-phosphate
  modified_base 11: mod_base = OTHER; note = cytidine-3'-phosphate
  modified_base 12: mod_base = OTHER; note = guanosine-3'-phosphate
  modified_base 13: mod_base = OTHER; note = uridine-3'-phosphate
  modified_base 14: mod_base = OTHER; note = guanosine-3'-phosphate
  modified_base 15: mod_base = OTHER; note = cytidine-3'-phosphate
  modified_base 16: mod_base = OTHER; note = uridine-3'-phosphate
  modified_base 17: mod_base = OTHER; note = cytidine-3'-phosphate
  modified_base 18: mod_base = OTHER; note = guanosine-3'-phosphate
  modified_base 19: mod_base = OTHER; note = guanosine-3'-phosphate
  misc_feature 1..19: note = RNA
  misc_feature 20..21: note = DNA
gctgtggttccgtgctcggtt

SEQ ID NO: 119 - DNA, 21 bp, synthetic construct
  source 1..21: mol_type = other DNA
  modified_base 1: mod_base = OTHER; note = cytidine-3'-phosphate
  modified_base 2: mod_base = OTHER; note = adenosine-3'-phosphate
  modified_base 3: mod_base = OTHER; note = cytidine-3'-phosphate
  modified_base 4: mod_base = OTHER; note = cytidine-3'-phosphate
  modified_base 5: mod_base = OTHER; note = guanosine-3'-phosphate
  modified_base 6: mod_base = OTHER; note = cytidine-3'-phosphate
  modified_base 7: mod_base = OTHER; note = uridine-3'-phosphate
  modified_base 8: mod_base = OTHER; note = guanosine-3'-phosphate
  modified_base 9: mod_base = OTHER; note = cytidine-3'-phosphate
  modified_base 10: mod_base = OTHER; note = guanosine-3'-phosphate
  modified_base 11: mod_base = OTHER; note = cytidine-3'-phosphate
  modified_base 12: mod_base = OTHER; note = cytidine-3'-phosphate
  modified_base 13: mod_base = OTHER; note = adenosine-3'-phosphate
  modified_base 14: mod_base = OTHER; note = adenosine-3'-phosphate
  modified_base 15: mod_base = OTHER; note = guanosine-3'-phosphate
  modified_base 16: mod_base = OTHER; note = guanosine-3'-phosphate
  modified_base 17: mod_base = OTHER; note = adenosine-3'-phosphate
  modified_base 18: mod_base = OTHER; note = uridine-3'-phosphate
  modified_base 19: mod_base = OTHER; note = cytidine-3'-phosphate
  misc_feature 1..19: note = RNA
  misc_feature 20..21: note = DNA
caccgctgcgccaaggatctt

SEQ ID NO: 120 - DNA, 21 bp, synthetic construct
  source 1..21: mol_type = other DNA
  modified_base 1: mod_base = OTHER; note = guanosine-3'-phosphate
  modified_base 2: mod_base = OTHER; note = adenosine-3'-phosphate
  modified_base 3: mod_base = OTHER; note = uridine-3'-phosphate
  modified_base 4: mod_base = OTHER; note = cytidine-3'-phosphate
  modified_base 5: mod_base = OTHER; note = cytidine-3'-phosphate
  modified_base 6: mod_base = OTHER; note = uridine-3'-phosphate
  modified_base 7: mod_base = OTHER; note = uridine-3'-phosphate
  modified_base 8: mod_base = OTHER; note = guanosine-3'-phosphate
  modified_base 9: mod_base = OTHER; note = guanosine-3'-phosphate
  modified_base 10: mod_base = OTHER; note = cytidine-3'-phosphate
  modified_base 11: mod_base = OTHER; note = guanosine-3'-phosphate
  modified_base 12: mod_base = OTHER; note = cytidine-3'-phosphate
  modified_base 13: mod_base = OTHER; note = adenosine-3'-phosphate
  modified_base 14: mod_base = OTHER; note = guanosine-3'-phosphate
  modified_base 15: mod_base = OTHER; note = cytidine-3'-phosphate
  modified_base 16: mod_base = OTHER; note = guanosine-3'-phosphate
  modified_base 17: mod_base = OTHER; note = guanosine-3'-phosphate
  modified_base 18: mod_base = OTHER; note = uridine-3'-phosphate
  modified_base 19: mod_base = OTHER; note = guanosine-3'-phosphate
  misc_feature 1..19: note = RNA
  misc_feature 20..21: note = DNA
gatccttggcgcagcggtgtt

SEQ ID NO: 121 - DNA, 21 bp, synthetic construct
  source 1..21: mol_type = other DNA
  modified_base 1: mod_base = OTHER; note = cytidine-3'-phosphate
  modified_base 2: mod_base = OTHER; note = cytidine-3'-phosphate
  modified_base 3: mod_base = OTHER; note = guanosine-3'-phosphate
  modified_base 4: mod_base = OTHER; note = cytidine-3'-phosphate
  modified_base 5: mod_base = OTHER; note = uridine-3'-phosphate
  modified_base 6: mod_base = OTHER; note = guanosine-3'-phosphate
  modified_base 7: mod_base = OTHER; note = cytidine-3'-phosphate
  modified_base 8: mod_base = OTHER; note = guanosine-3'-phosphate
  modified_base 9: mod_base = OTHER; note = cytidine-3'-phosphate
  modified_base 10: mod_base = OTHER; note = cytidine-3'-phosphate
  modified_base 11: mod_base = OTHER; note = adenosine-3'-phosphate
  modified_base 12: mod_base = OTHER; note = adenosine-3'-phosphate
  modified_base 13: mod_base = OTHER; note = guanosine-3'-phosphate
  modified_base 14: mod_base = OTHER; note = guanosine-3'-phosphate
  modified_base 15: mod_base = OTHER; note = adenosine-3'-phosphate
  modified_base 16: mod_base = OTHER; note = uridine-3'-phosphate
  modified_base 17: mod_base = OTHER; note = cytidine-3'-phosphate
  modified_base 18: mod_base = OTHER; note = cytidine-3'-phosphate
  modified_base 19: mod_base = OTHER; note = guanosine-3'-phosphate
  misc_feature 1..19: note = RNA
  misc_feature 20..21: note = DNA
ccgctgcgccaaggatccgtt

SEQ ID NO: 122 - DNA, 21 bp, synthetic construct
  source 1..21: mol_type = other DNA
  modified_base 1: mod_base = OTHER; note = cytidine-3'-phosphate
  modified_base 2: mod_base = OTHER; note = guanosine-3'-phosphate
  modified_base 3: mod_base = OTHER; note = guanosine-3'-phosphate
  modified_base 4: mod_base = OTHER; note = adenosine-3'-phosphate
  modified_base 5: mod_base = OTHER; note = uridine-3'-phosphate
  modified_base 6: mod_base = OTHER; note = cytidine-3'-phosphate
  modified_base 7: mod_base = OTHER; note = cytidine-3'-phosphate
  modified_base 8: mod_base = OTHER; note = uridine-3'-phosphate
  modified_base 9: mod_base = OTHER; note = uridine-3'-phosphate
  modified_base 10: mod_base = OTHER; note = guanosine-3'-phosphate
  modified_base 11: mod_base = OTHER; note = guanosine-3'-phosphate
  modified_base 12: mod_base = OTHER; note = cytidine-3'-phosphate
  modified_base 13: mod_base = OTHER; note = guanosine-3'-phosphate
  modified_base 14: mod_base = OTHER; note = cytidine-3'-phosphate
  modified_base 15: mod_base = OTHER; note = adenosine-3'-phosphate
  modified_base 16: mod_base = OTHER; note = guanosine-3'-phosphate
  modified_base 17: mod_base = OTHER; note = cytidine-3'-phosphate
  modified_base 18: mod_base = OTHER; note = guanosine-3'-phosphate
  modified_base 19: mod_base = OTHER; note = guanosine-3'-phosphate
  misc_feature 1..19: note = RNA
  misc_feature 20..21: note = DNA
cggatccttggcgcagcggtt

SEQ ID NO: 123 - DNA, 21 bp, synthetic construct
  source 1..21: mol_type = other DNA
  modified_base 1: mod_base = OTHER; note = cytidine-3'-phosphate
  modified_base 2: mod_base = OTHER; note = guanosine-3'-phosphate
  modified_base 3: mod_base = OTHER; note = cytidine-3'-phosphate
  modified_base 4: mod_base = OTHER; note = uridine-3'-phosphate
  modified_base 5: mod_base = OTHER; note = guanosine-3'-phosphate
  modified_base 6: mod_base = OTHER; note = cytidine-3'-phosphate
  modified_base 7: mod_base = OTHER; note = guanosine-3'-phosphate
  modified_base 8: mod_base = OTHER; note = cytidine-3'-phosphate
  modified_base 9: mod_base = OTHER; note = cytidine-3'-phosphate
  modified_base 10: mod_base = OTHER; note = adenosine-3'-phosphate
  modified_base 11: mod_base = OTHER; note = adenosine-3'-phosphate
  modified_base 12: mod_base = OTHER; note = guanosine-3'-phosphate
  modified_base 13: mod_base = OTHER; note = guanosine-3'-phosphate
  modified_base 14: mod_base = OTHER; note = adenosine-3'-phosphate
  modified_base 15: mod_base = OTHER; note = uridine-3'-phosphate
  modified_base 16: mod_base = OTHER; note = cytidine-3'-phosphate
  modified_base 17: mod_base = OTHER; note = cytidine-3'-phosphate
  modified_base 18: mod_base = OTHER; note = guanosine-3'-phosphate
  modified_base 19: mod_base = OTHER; note = uridine-3'-phosphate
  misc_feature 1..19: note = RNA
  misc_feature 20..21: note = DNA
cgctgcgccaaggatccgttt

SEQ ID NO: 124 - DNA, 21 bp, synthetic construct
  source 1..21: mol_type = other DNA
  modified_base 1: mod_base = OTHER; note = adenosine-3'-phosphate
  modified_base 2: mod_base = OTHER; note = cytidine-3'-phosphate
  modified_base 3: mod_base = OTHER; note = guanosine-3'-phosphate
  modified_base 4: mod_base = OTHER; note = guanosine-3'-phosphate
  modified_base 5: mod_base = OTHER; note = adenosine-3'-phosphate
  modified_base 6: mod_base = OTHER; note = uridine-3'-phosphate
  modified_base 7: mod_base = OTHER; note = cytidine-3'-phosphate
  modified_base 8: mod_base = OTHER; note = cytidine-3'-phosphate
  modified_base 9: mod_base = OTHER; note = uridine-3'-phosphate
  modified_base 10: mod_base = OTHER; note = uridine-3'-phosphate
  modified_base 11: mod_base = OTHER; note = guanosine-3'-phosphate
  modified_base 12: mod_base = OTHER; note = guanosine-3'-phosphate
  modified_base 13: mod_base = OTHER; note = cytidine-3'-phosphate
  modified_base 14: mod_base = OTHER; note = guanosine-3'-phosphate
  modified_base 15: mod_base = OTHER; note = cytidine-3'-phosphate
  modified_base 16: mod_base = OTHER; note = adenosine-3'-phosphate
  modified_base 17: mod_base = OTHER; note = guanosine-3'-phosphate
  modified_base 18: mod_base = OTHER; note = cytidine-3'-phosphate
  modified_base 19: mod_base = OTHER; note = guanosine-3'-phosphate
  misc_feature 1..19: note = RNA
  misc_feature 20..21: note = DNA
acggatccttggcgcagcgtt

SEQ ID NO: 125 - DNA, 21 bp, synthetic construct
  source 1..21: mol_type = other DNA
  modified_base 1: mod_base = OTHER; note = cytidine-3'-phosphate
  modified_base 2: mod_base = OTHER; note = uridine-3'-phosphate
  modified_base 3: mod_base = OTHER; note = guanosine-3'-phosphate
  modified_base 4: mod_base = OTHER; note = cytidine-3'-phosphate
  modified_base 5: mod_base = OTHER; note = guanosine-3'-phosphate
  modified_base 6: mod_base = OTHER; note = cytidine-3'-phosphate
  modified_base 7: mod_base = OTHER; note = cytidine-3'-phosphate
  modified_base 8: mod_base = OTHER; note = adenosine-3'-phosphate
  modified_base 9: mod_base = OTHER; note = adenosine-3'-phosphate
  modified_base 10: mod_base = OTHER; note = guanosine-3'-phosphate
  modified_base 11: mod_base = OTHER; note = guanosine-3'-phosphate
  modified_base 12: mod_base = OTHER; note = adenosine-3'-phosphate
  modified_base 13: mod_base = OTHER; note = uridine-3'-phosphate
  modified_base 14: mod_base = OTHER; note = cytidine-3'-phosphate
  modified_base 15: mod_base = OTHER; note = cytidine-3'-phosphate
  modified_base 16: mod_base = OTHER; note = guanosine-3'-phosphate
  modified_base 17: mod_base = OTHER; note = uridine-3'-phosphate
  modified_base 18: mod_base = OTHER; note = guanosine-3'-phosphate
  modified_base 19: mod_base = OTHER; note = guanosine-3'-phosphate
  misc_feature 1..19: note = RNA
  misc_feature 20..21: note = DNA
ctgcgccaaggatccgtggtt

SEQ ID NO: 126 - DNA, 21 bp, synthetic construct
  source 1..21: mol_type = other DNA
  modified_base 1: mod_base = OTHER; note = cytidine-3'-phosphate
  modified_base 2: mod_base = OTHER; note = cytidine-3'-phosphate
  modified_base 3: mod_base = OTHER; note = adenosine-3'-phosphate
  modified_base 4: mod_base = OTHER; note = cytidine-3'-phosphate
  modified_base 5: mod_base = OTHER; note = guanosine-3'-phosphate
  modified_base 6: mod_base = OTHER; note = guanosine-3'-phosphate
  modified_base 7: mod_base = OTHER; note = adenosine-3'-phosphate
  modified_base 8: mod_base = OTHER; note = uridine-3'-phosphate
  modified_base 9: mod_base = OTHER; note = cytidine-3'-phosphate
  modified_base 10: mod_base = OTHER; note = cytidine-3'-phosphate
  modified_base 11: mod_base = OTHER; note = uridine-3'-phosphate
  modified_base 12: mod_base = OTHER; note = uridine-3'-phosphate
  modified_base 13: mod_base = OTHER; note = guanosine-3'-phosphate
  modified_base 14: mod_base = OTHER; note = guanosine-3'-phosphate
  modified_base 15: mod_base = OTHER; note = cytidine-3'-phosphate
  modified_base 16: mod_base = OTHER; note = guanosine-3'-phosphate
  modified_base 17: mod_base = OTHER; note = cytidine-3'-phosphate
  modified_base 18: mod_base = OTHER; note = adenosine-3'-phosphate
  modified_base 19: mod_base = OTHER; note = guanosine-3'-phosphate
  misc_feature 1..19: note = RNA
  misc_feature 20..21: note = DNA
ccacggatccttggcgcagtt

SEQ ID NO: 127 - DNA, 21 bp, synthetic construct
  source 1..21: mol_type = other DNA
  modified_base 1: mod_base = OTHER; note = adenosine-3'-phosphate
  modified_base 2: mod_base = OTHER; note = uridine-3'-phosphate
  modified_base 3: mod_base = OTHER; note = cytidine-3'-phosphate
  modified_base 4: mod_base = OTHER; note = cytidine-3'-phosphate
  modified_base 5: mod_base = OTHER; note = guanosine-3'-phosphate
  modified_base 6: mod_base = OTHER; note = uridine-3'-phosphate
  modified_base 7: mod_base = OTHER; note = guanosine-3'-phosphate
  modified_base 8: mod_base = OTHER; note = guanosine-3'-phosphate
  modified_base 9: mod_base = OTHER; note = adenosine-3'-phosphate
  modified_base 10: mod_base = OTHER; note = guanosine-3'-phosphate
  modified_base 11: mod_base = OTHER; note = guanosine-3'-phosphate
  modified_base 12: mod_base = OTHER; note = uridine-3'-phosphate
  modified_base 13: mod_base = OTHER; note = uridine-3'-phosphate
  modified_base 14: mod_base = OTHER; note = guanosine-3'-phosphate
  modified_base 15: mod_base = OTHER; note = cytidine-3'-phosphate
  modified_base 16: mod_base = OTHER; note = cytidine-3'-phosphate
  modified_base 17: mod_base = OTHER; note = uridine-3'-phosphate
  modified_base 18: mod_base = OTHER; note = guanosine-3'-phosphate
  modified_base 19: mod_base = OTHER; note = guanosine-3'-phosphate
  misc_feature 1..19: note = RNA
  misc_feature 20..21: note = DNA
atccgtggaggttgcctggtt

SEQ ID NO: 128 - DNA, 21 bp, synthetic construct
  source 1..21: mol_type = other DNA
  modified_base 1: mod_base = OTHER; note = cytidine-3'-phosphate
  modified_base 2: mod_base = OTHER; note = cytidine-3'-phosphate
  modified_base 3: mod_base = OTHER; note = adenosine-3'-phosphate
  modified_base 4: mod_base = OTHER; note = guanosine-3'-phosphate
  modified_base 5: mod_base = OTHER; note = guanosine-3'-phosphate
  modified_base 6: mod_base = OTHER; note = cytidine-3'-phosphate
  modified_base 7: mod_base = OTHER; note = adenosine-3'-phosphate
  modified_base 8: mod_base = OTHER; note = adenosine-3'-phosphate
  modified_base 9: mod_base = OTHER; note = cytidine-3'-phosphate
  modified_base 10: mod_base = OTHER; note = cytidine-3'-phosphate
  modified_base 11: mod_base = OTHER; note = uridine-3'-phosphate
  modified_base 12: mod_base = OTHER; note = cytidine-3'-phosphate
  modified_base 13: mod_base = OTHER; note = cytidine-3'-phosphate
  modified_base 14: mod_base = OTHER; note = adenosine-3'-phosphate
  modified_base 15: mod_base = OTHER; note = cytidine-3'-phosphate
  modified_base 16: mod_base = OTHER; note = guanosine-3'-phosphate
  modified_base 17: mod_base = OTHER; note = guanosine-3'-phosphate
  modified_base 18: mod_base = OTHER; note = adenosine-3'-phosphate
  modified_base 19: mod_base = OTHER; note = uridine-3'-phosphate
  misc_feature 1..19: note = RNA
  misc_feature 20..21: note = DNA
ccaggcaacctccacggattt

SEQ ID NO: 129 - DNA, 21 bp, synthetic construct
  source 1..21: mol_type = other DNA
  modified_base 1: mod_base = OTHER; note = guanosine-3'-phosphate
  modified_base 2: mod_base = OTHER; note = guanosine-3'-phosphate
  modified_base 3: mod_base = OTHER; note = uridine-3'-phosphate
  modified_base 4: mod_base = OTHER; note = uridine-3'-phosphate
  modified_base 5: mod_base = OTHER; note = guanosine-3'-phosphate
  modified_base 6: mod_base = OTHER; note = cytidine-3'-phosphate
  modified_base 7: mod_base = OTHER; note = cytidine-3'-phosphate
  modified_base 8: mod_base = OTHER; note = uridine-3'-phosphate
  modified_base 9: mod_base = OTHER; note = guanosine-3'-phosphate
  modified_base 10: mod_base = OTHER; note = guanosine-3'-phosphate
  modified_base 11: mod_base = OTHER; note = cytidine-3'-phosphate
  modified_base 12: mod_base = OTHER; note = adenosine-3'-phosphate
  modified_base 13: mod_base = OTHER; note = cytidine-3'-phosphate
  modified_base 14: mod_base = OTHER; note = cytidine-3'-phosphate
  modified_base 15: mod_base = OTHER; note = uridine-3'-phosphate
  modified_base 16: mod_base = OTHER; note = adenosine-3'-phosphate
  modified_base 17: mod_base = OTHER; note = cytidine-3'-phosphate
  modified_base 18: mod_base = OTHER; note = guanosine-3'-phosphate
  modified_base 19: mod_base = OTHER; note = uridine-3'-phosphate
  misc_feature 1..19: note = RNA
  misc_feature 20..21: note = DNA
ggttgcctggcacctacgttt

SEQ ID NO: 130 - DNA, 21 bp, synthetic construct
  source 1..21: mol_type = other DNA
  modified_base 1: mod_base = OTHER; note = adenosine-3'-phosphate
  modified_base 2: mod_base = OTHER; note = cytidine-3'-phosphate
  modified_base 3: mod_base = OTHER; note = guanosine-3'-phosphate
  modified_base 4: mod_base = OTHER; note = uridine-3'-phosphate
  modified_base 5: mod_base = OTHER; note = adenosine-3'-phosphate
  modified_base 6: mod_base = OTHER; note = guanosine-3'-phosphate
  modified_base 7: mod_base = OTHER; note = guanosine-3'-phosphate
  modified_base 8: mod_base = OTHER; note = uridine-3'-phosphate
  modified_base 9: mod_base = OTHER; note = guanosine-3'-phosphate
  modified_base 10: mod_base = OTHER; note = cytidine-3'-phosphate
  modified_base 11: mod_base = OTHER; note = cytidine-3'-phosphate
  modified_base 12: mod_base = OTHER; note = adenosine-3'-phosphate
  modified_base 13: mod_base = OTHER; note = guanosine-3'-phosphate
  modified_base 14: mod_base = OTHER; note = guanosine-3'-phosphate
  modified_base 15: mod_base = OTHER; note = cytidine-3'-phosphate
  modified_base 16: mod_base = OTHER; note = adenosine-3'-phosphate
  modified_base 17: mod_base = OTHER; note = adenosine-3'-phosphate
  modified_base 18: mod_base = OTHER; note = cytidine-3'-phosphate
  modified_base 19: mod_base = OTHER; note = cytidine-3'-phosphate
  misc_feature 1..19: note = RNA
  misc_feature 20..21: note = DNA
acgtaggtgccaggcaacctt

SEQ ID NO: 131 - DNA, 21 bp, synthetic construct
  source 1..21: mol_type = other DNA
  modified_base 1: mod_base = OTHER; note = adenosine-3'-phosphate
  modified_base 2: mod_base = OTHER; note = guanosine-3'-phosphate
  modified_base 3: mod_base = OTHER; note = guanosine-3'-phosphate
  modified_base 4: mod_base = OTHER; note = adenosine-3'-phosphate
  modified_base 5: mod_base = OTHER; note = guanosine-3'-phosphate
  modified_base 6: mod_base = OTHER; note = adenosine-3'-phosphate
  modified_base 7: mod_base = OTHER; note = cytidine-3'-phosphate
  modified_base 8: mod_base = OTHER; note = cytidine-3'-phosphate
  modified_base 9: mod_base = OTHER; note = cytidine-3'-phosphate
  modified_base 10: mod_base = OTHER; note = adenosine-3'-phosphate
  modified_base 11: mod_base = OTHER; note = cytidine-3'-phosphate
  modified_base 12: mod_base = OTHER; note = cytidine-3'-phosphate
  modified_base 13: mod_base = OTHER; note = uridine-3'-phosphate
  modified_base 14: mod_base = OTHER; note = cytidine-3'-phosphate
  modified_base 15: mod_base = OTHER; note = uridine-3'-phosphate
  modified_base 16: mod_base = OTHER; note = cytidine-3'-phosphate
  modified_base 17: mod_base = OTHER; note = guanosine-3'-phosphate
  modified_base 18: mod_base = OTHER; note = cytidine-3'-phosphate
  modified_base 19: mod_base = OTHER; note = adenosine-3'-phosphate
  misc_feature 1..19: note = RNA
  misc_feature 20..21: note = DNA
aggagacccacctctcgcatt

SEQ ID NO: 132 - DNA, 21 bp, synthetic construct
  source 1..21: mol_type = other DNA
  modified_base 1: mod_base = OTHER; note = uridine-3'-phosphate
  modified_base 2: mod_base = OTHER; note = guanosine-3'-phosphate
  modified_base 3: mod_base = OTHER; note = cytidine-3'-phosphate
  modified_base 4: mod_base = OTHER; note = guanosine-3'-phosphate
  modified_base 5: mod_base = OTHER; note = adenosine-3'-phosphate
  modified_base 6: mod_base = OTHER; note = guanosine-3'-phosphate
  modified_base 7: mod_base = OTHER; note = adenosine-3'-phosphate
  modified_base 8: mod_base = OTHER; note = guanosine-3'-phosphate
  modified_base 9: mod_base = OTHER; note = guanosine-3'-phosphate
  modified_base 10: mod_base = OTHER; note = uridine-3'-phosphate
  modified_base 11: mod_base = OTHER; note = guanosine-3'-phosphate
  modified_base 12: mod_base = OTHER; note = guanosine-3'-phosphate
  modified_base 13: mod_base = OTHER; note = guanosine-3'-phosphate
  modified_base 14: mod_base = OTHER; note = uridine-3'-phosphate
  modified_base 15: mod_base = OTHER; note = cytidine-3'-phosphate
  modified_base 16: mod_base = OTHER; note = uridine-3'-phosphate
  modified_base 17: mod_base = OTHER; note = cytidine-3'-phosphate
  modified_base 18: mod_base = OTHER; note = cytidine-3'-phosphate
  modified_base 19: mod_base = OTHER; note = uridine-3'-phosphate
  misc_feature 1..19: note = RNA
  misc_feature 20..21: note = DNA
tgcgagaggtgggtctccttt

SEQ ID NO: 133 - DNA, 21 bp, synthetic construct
  source 1..21: mol_type = other DNA
  modified_base 1: mod_base = OTHER; note = guanosine-3'-phosphate
  modified_base 2: mod_base = OTHER; note = guanosine-3'-phosphate
  modified_base 3: mod_base = OTHER; note = adenosine-3'-phosphate
  modified_base 4: mod_base = OTHER; note = guanosine-3'-phosphate
  modified_base 5: mod_base = OTHER; note = adenosine-3'-phosphate
  modified_base 6: mod_base = OTHER; note = cytidine-3'-phosphate
  modified_base 7: mod_base = OTHER; note = cytidine-3'-phosphate
  modified_base 8: mod_base = OTHER; note = cytidine-3'-phosphate
  modified_base 9: mod_base = OTHER; note = adenosine-3'-phosphate
  modified_base 10: mod_base = OTHER; note = cytidine-3'-phosphate
  modified_base 11: mod_base = OTHER; note = cytidine-3'-phosphate
  modified_base 12: mod_base = OTHER; note = uridine-3'-phosphate
  modified_base 13: mod_base = OTHER; note = cytidine-3'-phosphate
  modified_base 14: mod_base = OTHER; note = uridine-3'-phosphate
  modified_base 15: mod_base = OTHER; note = cytidine-3'-phosphate
  modified_base 16: mod_base = OTHER; note = guanosine-3'-phosphate
  modified_base 17: mod_base = OTHER; note = cytidine-3'-phosphate
  modified_base 18: mod_base = OTHER; note = adenosine-3'-phosphate
  modified_base 19: mod_base = OTHER; note = guanosine-3'-phosphate
  misc_feature 1..19: note = RNA
  misc_feature 20..21: note = DNA
ggagacccacctctcgcagtt

SEQ ID NO: 134 - DNA, 21 bp, synthetic construct
  source 1..21: mol_type = other DNA
  modified_base 1: mod_base = OTHER; note = cytidine-3'-phosphate
  modified_base 2: mod_base = OTHER; note = uridine-3'-phosphate
  modified_base 3: mod_base = OTHER; note = guanosine-3'-phosphate
  modified_base 4: mod_base = OTHER; note = cytidine-3'-phosphate
  modified_base 5: mod_base = OTHER; note = guanosine-3'-phosphate
  modified_base 6: mod_base = OTHER; note = adenosine-3'-phosphate
  modified_base 7: mod_base = OTHER; note = guanosine-3'-phosphate
  modified_base 8: mod_base = OTHER; note = adenosine-3'-phosphate
  modified_base 9: mod_base = OTHER; note = guanosine-3'-phosphate
  modified_base 10: mod_base = OTHER; note = guanosine-3'-phosphate
  modified_base 11: mod_base = OTHER; note = uridine-3'-phosphate
  modified_base 12: mod_base = OTHER; note = guanosine-3'-phosphate
  modified_base 13: mod_base = OTHER; note = guanosine-3'-phosphate
  modified_base 14: mod_base = OTHER; note = guanosine-3'-phosphate
  modified_base 15: mod_base = OTHER; note = uridine-3'-phosphate
  modified_base 16: mod_base = OTHER; note = cytidine-3'-phosphate
  modified_base 17: mod_base = OTHER; note = uridine-3'-phosphate
  modified_base 18: mod_base = OTHER; note = cytidine-3'-phosphate
  modified_base 19: mod_base = OTHER; note = cytidine-3'-phosphate
  misc_feature 1..19: note = RNA
  misc_feature 20..21: note = DNA
ctgcgagaggtgggtctcctt

SEQ ID NO: 135 - DNA, 21 bp, synthetic construct
  source 1..21: mol_type = other DNA
  modified_base 1: mod_base = OTHER; note = guanosine-3'-phosphate
  modified_base 2: mod_base = OTHER; note = adenosine-3'-phosphate
  modified_base 3: mod_base = OTHER; note = guanosine-3'-phosphate
  modified_base 4: mod_base = OTHER; note = adenosine-3'-phosphate
  modified_base 5: mod_base = OTHER; note = cytidine-3'-phosphate
  modified_base 6: mod_base = OTHER; note = cytidine-3'-phosphate
  modified_base 7: mod_base = OTHER; note = cytidine-3'-phosphate
  modified_base 8: mod_base = OTHER; note = adenosine-3'-phosphate
  modified_base 9: mod_base = OTHER; note = cytidine-3'-phosphate
  modified_base 10: mod_base = OTHER; note = cytidine-3'-phosphate
  modified_base 11: mod_base = OTHER; note = uridine-3'-phosphate
  modified_base 12: mod_base = OTHER; note = cytidine-3'-phosphate
  modified_base 13: mod_base = OTHER; note = uridine-3'-phosphate
  modified_base 14: mod_base = OTHER; note = cytidine-3'-phosphate
  modified_base 15: mod_base = OTHER; note = guanosine-3'-phosphate
  modified_base 16: mod_base = OTHER; note = cytidine-3'-phosphate
  modified_base 17: mod_base = OTHER; note = adenosine-3'-phosphate
  modified_base 18: mod_base = OTHER; note = guanosine-3'-phosphate
  modified_base 19: mod_base = OTHER; note = uridine-3'-phosphate
  misc_feature 1..19: note = RNA
  misc_feature 20..21: note = DNA
gagacccacctctcgcagttt

SEQ ID NO: 136 - DNA, 21 bp, synthetic construct
  source 1..21: mol_type = other DNA
  modified_base 1: mod_base = OTHER; note = adenosine-3'-phosphate
  modified_base 2: mod_base = OTHER; note = cytidine-3'-phosphate
  modified_base 3: mod_base = OTHER; note = uridine-3'-phosphate
  modified_base 4: mod_base = OTHER; note = guanosine-3'-phosphate
  modified_base 5: mod_base = OTHER; note = cytidine-3'-phosphate
  modified_base 6: mod_base = OTHER; note = guanosine-3'-phosphate
  modified_base 7: mod_base = OTHER; note = adenosine-3'-phosphate
  modified_base 8: mod_base = OTHER; note = guanosine-3'-phosphate
  modified_base 9: mod_base = OTHER; note = adenosine-3'-phosphate
  modified_base 10: mod_base = OTHER; note = guanosine-3'-phosphate
  modified_base 11: mod_base = OTHER; note = guanosine-3'-phosphate
  modified_base 12: mod_base = OTHER; note = uridine-3'-phosphate
  modified_base 13: mod_base = OTHER; note = guanosine-3'-phosphate
  modified_base 14: mod_base = OTHER; note = guanosine-3'-phosphate
  modified_base 15: mod_base = OTHER; note = guanosine-3'-phosphate
  modified_base 16: mod_base = OTHER; note = uridine-3'-phosphate
  modified_base 17: mod_base = OTHER; note = cytidine-3'-phosphate
  modified_base 18: mod_base = OTHER; note = uridine-3'-phosphate
  modified_base 19: mod_base = OTHER; note = cytidine-3'-phosphate
  misc_feature 1..19: note = RNA
  misc_feature 20..21: note = DNA
actgcgagaggtgggtctctt

SEQ ID NO: 137 - DNA, 21 bp, synthetic construct
  source 1..21: mol_type = other DNA
  modified_base 1: mod_base = OTHER; note = cytidine-3'-phosphate
  modified_base 2: mod_base = OTHER; note = cytidine-3'-phosphate
  modified_base 3: mod_base = OTHER; note = adenosine-3'-phosphate
  modified_base 4: mod_base = OTHER; note = cytidine-3'-phosphate
  modified_base 5: mod_base = OTHER; note = cytidine-3'-phosphate
  modified_base 6: mod_base = OTHER; note = uridine-3'-phosphate
  modified_base 7: mod_base = OTHER; note = cytidine-3'-phosphate
  modified_base 8: mod_base = OTHER; note = uridine-3'-phosphate
  modified_base 9: mod_base = OTHER; note = cytidine-3'-phosphate
  modified_base 10: mod_base = OTHER; note = guanosine-3'-phosphate
  modified_base 11: mod_base = OTHER; note = cytidine-3'-phosphate
  modified_base 12: mod_base = OTHER; note = adenosine-3'-phosphate
  modified_base 13: mod_base = OTHER; note = guanosine-3'-phosphate
  modified_base 14: mod_base = OTHER; note = uridine-3'-phosphate
  modified_base 15: mod_base = OTHER; note = cytidine-3'-phosphate
  modified_base 16: mod_base = OTHER; note = adenosine-3'-phosphate
  modified_base 17: mod_base = OTHER; note = guanosine-3'-phosphate
  modified_base 18: mod_base = OTHER; note = adenosine-3'-phosphate
  modified_base 19: mod_base = OTHER; note = guanosine-3'-phosphate
  misc_feature 1..19: note = RNA
  misc_feature 20..21: note = DNA
ccacctctcgcagtcagagtt

SEQ ID NO: 138 - DNA, 21 bp, synthetic construct
  source 1..21: mol_type = other DNA
  modified_base 1: mod_base = OTHER; note = cytidine-3'-phosphate
  modified_base 2: mod_base = OTHER; note = uridine-3'-phosphate
  modified_base 3: mod_base = OTHER; note = cytidine-3'-phosphate
  modified_base 4: mod_base = OTHER; note = uridine-3'-phosphate
  modified_base 5: mod_base = OTHER; note = guanosine-3'-phosphate
  modified_base 6: mod_base = OTHER; note = adenosine-3'-phosphate
  modified_base 7: mod_base = OTHER; note = cytidine-3'-phosphate
  modified_base 8: mod_base = OTHER; note = uridine-3'-phosphate
  modified_base 9: mod_base = OTHER; note = guanosine-3'-phosphate
  modified_base 10: mod_base = OTHER; note = cytidine-3'-phosphate
  modified_base 11: mod_base = OTHER; note = guanosine-3'-phosphate
  modified_base 12: mod_base = OTHER; note = adenosine-3'-phosphate
  modified_base 13: mod_base = OTHER; note = guanosine-3'-phosphate
  modified_base 14: mod_base = OTHER; note = adenosine-3'-phosphate
  modified_base 15: mod_base = OTHER; note = guanosine-3'-phosphate
  modified_base 16: mod_base = OTHER; note = guanosine-3'-phosphate
  modified_base 17: mod_base = OTHER; note = uridine-3'-phosphate
  modified_base 18: mod_base = OTHER; note = guanosine-3'-phosphate
  modified_base 19: mod_base = OTHER; note = guanosine-3'-phosphate
  misc_feature 1..19: note = RNA
  misc_feature 20..21: note = DNA
ctctgactgcgagaggtggtt

SEQ ID NO: 139 - DNA, 21 bp, synthetic construct
  source 1..21: mol_type = other DNA
  modified_base 1: mod_base = OTHER; note = cytidine-3'-phosphate
  modified_base 2: mod_base = OTHER; note = cytidine-3'-phosphate
  modified_base 3: mod_base = OTHER; note = uridine-3'-phosphate
  modified_base 4: mod_base = OTHER; note = cytidine-3'-phosphate
  modified_base 5: mod_base = OTHER; note = uridine-3'-phosphate
  modified_base 6: mod_base = OTHER; note = cytidine-3'-phosphate
  modified_base 7: mod_base = OTHER; note = guanosine-3'-phosphate
  modified_base 8: mod_base = OTHER; note = cytidine-3'-phosphate
  modified_base 9: mod_base = OTHER; note = adenosine-3'-phosphate
  modified_base 10: mod_base = OTHER; note = guanosine-3'-phosphate
  modified_base 11: mod_base = OTHER; note = uridine-3'-phosphate
  modified_base 12: mod_base = OTHER; note = cytidine-3'-phosphate
  modified_base 13: mod_base = OTHER; note = adenosine-3'-phosphate
  modified_base 14: mod_base = OTHER; note = guanosine-3'-phosphate
  modified_base 15: mod_base = OTHER; note = adenosine-3'-phosphate
  modified_base 16: mod_base = OTHER; note = guanosine-3'-phosphate
  modified_base 17: mod_base = OTHER; note = cytidine-3'-phosphate
  modified_base 18: mod_base = OTHER; note = guanosine-3'-phosphate
  modified_base 19: mod_base = OTHER; note = cytidine-3'-phosphate
  misc_feature 1..19: note = RNA
  misc_feature 20..21: note = DNA
cctctcgcagtcagagcgctt

SEQ ID NO: 140 - DNA, 21 bp, synthetic construct
  source 1..21: mol_type = other DNA
  modified_base 1: mod_base = OTHER; note = guanosine-3'-phosphate
  modified_base 2: mod_base = OTHER; note = cytidine-3'-phosphate
  modified_base 3: mod_base = OTHER; note = guanosine-3'-phosphate
  modified_base 4: mod_base = OTHER; note = cytidine-3'-phosphate
  modified_base 5: mod_base = OTHER; note = uridine-3'-phosphate
  modified_base 6: mod_base = OTHER; note = cytidine-3'-phosphate
  modified_base 7: mod_base = OTHER; note = uridine-3'-phosphate
  modified_base 8: mod_base = OTHER; note = guanosine-3'-phosphate
  modified_base 9: mod_base = OTHER; note = adenosine-3'-phosphate
  modified_base 10: mod_base = OTHER; note = cytidine-3'-phosphate
  modified_base 11: mod_base = OTHER; note = uridine-3'-phosphate
  modified_base 12: mod_base = OTHER; note = guanosine-3'-phosphate
  modified_base 13: mod_base = OTHER; note = cytidine-3'-phosphate
  modified_base 14: mod_base = OTHER; note = guanosine-3'-phosphate
  modified_base 15: mod_base = OTHER; note = adenosine-3'-phosphate
  modified_base 16: mod_base = OTHER; note = guanosine-3'-phosphate
  modified_base 17: mod_base = OTHER; note = adenosine-3'-phosphate
  modified_base 18: mod_base = OTHER; note = guanosine-3'-phosphate
  modified_base 19: mod_base = OTHER; note = guanosine-3'-phosphate
  misc_feature 1..19: note = RNA
  misc_feature 20..21: note = DNA
gcgctctgactgcgagaggtt

SEQ ID NO: 141 - DNA, 21 bp, synthetic construct
  source 1..21: mol_type = other DNA
  modified_base 1: mod_base = OTHER; note = cytidine-3'-phosphate
  modified_base 2: mod_base = OTHER; note = uridine-3'-phosphate
  modified_base 3: mod_base = OTHER; note = cytidine-3'-phosphate
  modified_base 4: mod_base = OTHER; note = uridine-3'-phosphate
  modified_base 5: mod_base = OTHER; note = cytidine-3'-phosphate
  modified_base 6: mod_base = OTHER; note = guanosine-3'-phosphate
  modified_base 7: mod_base = OTHER; note = cytidine-3'-phosphate
  modified_base 8: mod_base = OTHER; note = adenosine-3'-phosphate
  modified_base 9: mod_base = OTHER; note = guanosine-3'-phosphate
  modified_base 10: mod_base = OTHER; note = uridine-3'-phosphate
  modified_base 11: mod_base = OTHER; note = cytidine-3'-phosphate
  modified_base 12: mod_base = OTHER; note = adenosine-3'-phosphate
  modified_base 13: mod_base = OTHER; note = guanosine-3'-phosphate
  modified_base 14: mod_base = OTHER; note = adenosine-3'-phosphate
  modified_base 15: mod_base = OTHER; note = guanosine-3'-phosphate
  modified_base 16: mod_base = OTHER; note = cytidine-3'-phosphate
  modified_base 17: mod_base = OTHER; note = guanosine-3'-phosphate
  modified_base 18: mod_base = OTHER; note = cytidine-3'-phosphate
  modified_base 19: mod_base = OTHER; note = adenosine-3'-phosphate
  misc_feature 1..19: note = RNA
  misc_feature 20..21: note = DNA
ctctcgcagtcagagcgcatt

SEQ ID NO: 142 - DNA, 21 bp, synthetic construct
  source 1..21: mol_type = other DNA
  modified_base 1: mod_base = OTHER; note = uridine-3'-phosphate
  modified_base 2: mod_base = OTHER; note = guanosine-3'-phosphate
  modified_base 3: mod_base = OTHER; note = cytidine-3'-phosphate
  modified_base 4: mod_base = OTHER; note = guanosine-3'-phosphate
  modified_base 5: mod_base = OTHER; note = cytidine-3'-phosphate
  modified_base 6: mod_base = OTHER; note = uridine-3'-phosphate
  modified_base 7: mod_base = OTHER; note = cytidine-3'-phosphate
  modified_base 8: mod_base = OTHER; note = uridine-3'-phosphate
  modified_base 9: mod_base = OTHER; note = guanosine-3'-phosphate
  modified_base 10: mod_base = OTHER; note = adenosine-3'-phosphate
  modified_base 11: mod_base = OTHER; note = cytidine-3'-phosphate
  modified_base 12: mod_base = OTHER; note = uridine-3'-phosphate
  modified_base 13: mod_base = OTHER; note = guanosine-3'-phosphate
  modified_base 14: mod_base = OTHER; note = cytidine-3'-phosphate
  modified_base 15: mod_base = OTHER; note = guanosine-3'-phosphate
  modified_base 16: mod_base = OTHER; note = adenosine-3'-phosphate
  modified_base 17: mod_base = OTHER; note = guanosine-3'-phosphate
  modified_base 18: mod_base = OTHER; note = adenosine-3'-phosphate
  modified_base 19: mod_base = OTHER; note = guanosine-3'-phosphate
  misc_feature 1..19: note = RNA
  misc_feature 20..21: note = DNA
tgcgctctgactgcgagagtt

SEQ ID NO: 143 - DNA, 21 bp, synthetic construct
  source 1..21: mol_type = other DNA
  modified_base 1: mod_base = OTHER; note = uridine-3'-phosphate
  modified_base 2: mod_base = OTHER; note = cytidine-3'-phosphate
  modified_base 3: mod_base = OTHER; note = uridine-3'-phosphate
  modified_base 4: mod_base = OTHER; note = cytidine-3'-phosphate
  modified_base 5: mod_base = OTHER; note = guanosine-3'-phosphate
  modified_base 6: mod_base = OTHER; note = cytidine-3'-phosphate
  modified_base 7: mod_base = OTHER; note = adenosine-3'-phosphate
  modified_base 8: mod_base = OTHER; note = guanosine-3'-phosphate
  modified_base 9: mod_base = OTHER; note = uridine-3'-phosphate
  modified_base 10: mod_base = OTHER; note = cytidine-3'-phosphate
  modified_base 11: mod_base = OTHER; note = adenosine-3'-phosphate
  modified_base 12: mod_base = OTHER; note = guanosine-3'-phosphate
  modified_base 13: mod_base = OTHER; note = adenosine-3'-phosphate
  modified_base 14: mod_base = OTHER; note = guanosine-3'-phosphate
  modified_base 15: mod_base = OTHER; note = cytidine-3'-phosphate
  modified_base 16: mod_base = OTHER; note = guanosine-3'-phosphate
  modified_base 17: mod_base = OTHER; note = cytidine-3'-phosphate
  modified_base 18: mod_base = OTHER; note = adenosine-3'-phosphate
  modified_base 19: mod_base = OTHER; note = cytidine-3'-phosphate
  misc_feature 1..19: note = RNA
  misc_feature 20..21: note = DNA
tctcgcagtcagagcgcactt

SEQ ID NO: 144 - DNA, 21 bp, synthetic construct
  source 1..21: mol_type = other DNA
  modified_base 1: mod_base = OTHER; note = guanosine-3'-phosphate
  modified_base 2: mod_base = OTHER; note = uridine-3'-phosphate
  modified_base 3: mod_base = OTHER; note = guanosine-3'-phosphate
  modified_base 4: mod_base = OTHER; note = cytidine-3'-phosphate
  modified_base 5: mod_base = OTHER; note = guanosine-3'-phosphate
  modified_base 6: mod_base = OTHER; note = cytidine-3'-phosphate
  modified_base 7: mod_base = OTHER; note = uridine-3'-phosphate
  modified_base 8: mod_base = OTHER; note = cytidine-3'-phosphate
  modified_base 9: mod_base = OTHER; note = uridine-3'-phosphate
  modified_base 10: mod_base = OTHER; note = guanosine-3'-phosphate
  modified_base 11: mod_base = OTHER; note = adenosine-3'-phosphate
  modified_base 12: mod_base = OTHER; note = cytidine-3'-phosphate
  modified_base 13: mod_base = OTHER; note = uridine-3'-phosphate
  modified_base 14: mod_base = OTHER; note = guanosine-3'-phosphate
  modified_base 15: mod_base = OTHER; note = cytidine-3'-phosphate
  modified_base 16: mod_base = OTHER; note = guanosine-3'-phosphate
  modified_base 17: mod_base = OTHER; note = adenosine-3'-phosphate
  modified_base 18: mod_base = OTHER; note = guanosine-3'-phosphate
  modified_base 19: mod_base = OTHER; note = adenosine-3'-phosphate
  misc_feature 1..19: note = RNA
  misc_feature 20..21: note = DNA
gtgcgctctgactgcgagatt

SEQ ID NO: 145 - DNA, 21 bp, synthetic construct
  source 1..21: mol_type = other DNA
  modified_base 1: mod_base = OTHER; note = cytidine-3'-phosphate
  modified_base 2: mod_base = OTHER; note = uridine-3'-phosphate
  modified_base 3: mod_base = OTHER; note = cytidine-3'-phosphate
  modified_base 4: mod_base = OTHER; note = guanosine-3'-phosphate
  modified_base 5: mod_base = OTHER; note = cytidine-3'-phosphate
  modified_base 6: mod_base = OTHER; note = adenosine-3'-phosphate
  modified_base 7: mod_base = OTHER; note = guanosine-3'-phosphate
  modified_base 8: mod_base = OTHER; note = uridine-3'-phosphate
  modified_base 9: mod_base = OTHER; note = cytidine-3'-phosphate
  modified_base 10: mod_base = OTHER; note = adenosine-3'-phosphate
  modified_base 11: mod_base = OTHER; note = guanosine-3'-phosphate
  modified_base 12: mod_base = OTHER; note = adenosine-3'-phosphate
  modified_base 13: mod_base = OTHER; note = guanosine-3'-phosphate
  modified_base 14: mod_base = OTHER; note = cytidine-3'-phosphate
  modified_base 15: mod_base = OTHER; note = guanosine-3'-phosphate
  modified_base 16: mod_base = OTHER; note = cytidine-3'-phosphate
  modified_base 17: mod_base = OTHER; note = adenosine-3'-phosphate
  modified_base 18: mod_base = OTHER; note = cytidine-3'-phosphate
  modified_base 19: mod_base = OTHER; note = uridine-3'-phosphate
  modified_base 20: mod_base = OTHER; note = 2'-deoxythymidine-3'-phosphorothioate
  misc_feature 1..19: note = RNA
  misc_feature 20..21: note = DNA
ctcgcagtcagagcgcacttt

SEQ ID NO: 146 - DNA, 21 bp, synthetic construct
  source 1..21: mol_type = other DNA
  modified_base 1: mod_base = OTHER; note = adenosine-3'-phosphate
  modified_base 2: mod_base = OTHER; note = guanosine-3'-phosphate
  modified_base 3: mod_base = OTHER; note = uridine-3'-phosphate
  modified_base 4: mod_base = OTHER; note = guanosine-3'-phosphate
  modified_base 5: mod_base = OTHER; note = cytidine-3'-phosphate
  modified_base 6: mod_base = OTHER; note = guanosine-3'-phosphate
  modified_base 7: mod_base = OTHER; note = cytidine-3'-phosphate
  modified_base 8: mod_base = OTHER; note = uridine-3'-phosphate
  modified_base 9: mod_base = OTHER; note = cytidine-3'-phosphate
  modified_base 10: mod_base = OTHER; note = uridine-3'-phosphate
  modified_base 11: mod_base = OTHER; note = guanosine-3'-phosphate
  modified_base 12: mod_base = OTHER; note = adenosine-3'-phosphate
  modified_base 13: mod_base = OTHER; note = cytidine-3'-phosphate
  modified_base 14: mod_base = OTHER; note = uridine-3'-phosphate
  modified_base 15: mod_base = OTHER; note = guanosine-3'-phosphate
  modified_base 16: mod_base = OTHER; note = cytidine-3'-phosphate
  modified_base 17: mod_base = OTHER; note = guanosine-3'-phosphate
  modified_base 18: mod_base = OTHER; note = adenosine-3'-phosphate
  modified_base 19: mod_base = OTHER; note = guanosine-3'-phosphate
  modified_base 20: mod_base = OTHER; note = 2'-deoxythymidine-3'-phosphorothioate
  misc_feature 1..19: note = RNA
  misc_feature 20..21: note = DNA
agtgcgctctgactgcgagtt

SEQ ID NO: 147 - DNA, 21 bp, synthetic construct
  source 1..21: mol_type = other DNA
  modified_base 1: mod_base = OTHER; note = 2'-O-methylcytidine-3'-phosphate
  modified_base 2: mod_base = OTHER; note = 2'-O-methyluridine-3'-phosphate
  modified_base 3: mod_base = OTHER; note = 2'-O-methylcytidine-3'-phosphate
  modified_base 4: mod_base = OTHER; note = guanosine-3'-phosphate
  modified_base 5: mod_base = OTHER; note = 2'-O-methylcytidine-3'-phosphate
  modified_base 6: mod_base = OTHER; note = adenosine-3'-phosphate
  modified_base 7: mod_base = OTHER; note = guanosine-3'-phosphate
  modified_base 8: mod_base = OTHER; note = 2'-O-methyluridine-3'-phosphate
  modified_base 9: mod_base = OTHER; note = 2'-O-methylcytidine-3'-phosphate
  modified_base 10: mod_base = OTHER; note = adenosine-3'-phosphate
  modified_base 11: mod_base = OTHER; note = guanosine-3'-phosphate
  modified_base 12: mod_base = OTHER; note = adenosine-3'-phosphate
  modified_base 13: mod_base = OTHER; note = guanosine-3'-phosphate
  modified_base 14: mod_base = OTHER; note = 2'-O-methylcytidine-3'-phosphate
  modified_base 15: mod_base = OTHER; note = guanosine-3'-phosphate
  modified_base 16: mod_base = OTHER; note = 2'-O-methylcytidine-3'-phosphate
  modified_base 17: mod_base = OTHER; note = adenosine-3'-phosphate
  modified_base 18: mod_base = OTHER; note = 2'-O-methylcytidine-3'-phosphate
  modified_base 19: mod_base = OTHER; note = 2'-O-methyluridine-3'-phosphate
  modified_base 20: mod_base = OTHER; note = 2'-deoxythymidine-3'-phosphorothioate
  misc_feature 1..19: note = RNA
  misc_feature 20..21: note = DNA
ctcgcagtcagagcgcacttt

SEQ ID NO: 148 - DNA, 21 bp, synthetic construct
  source 1..21: mol_type = other DNA
  modified_base 1: mod_base = OTHER; note = adenosine-3'-phosphate
  modified_base 2: mod_base = OTHER; note = guanosine-3'-phosphate
  modified_base 3: mod_base = OTHER; note = uridine-3'-phosphate
  modified_base 4: mod_base = OTHER; note = guanosine-3'-phosphate
  modified_base 5: mod_base = OTHER; note = cytidine-3'-phosphate
  modified_base 6: mod_base = OTHER; note = guanosine-3'-phosphate
  modified_base 7: mod_base = OTHER; note = cytidine-3'-phosphate
  modified_base 8: mod_base = OTHER; note = uridine-3'-phosphate
  modified_base 9: mod_base = OTHER; note = cytidine-3'-phosphate
  modified_base 10: mod_base = OTHER; note = uridine-3'-phosphate
  modified_base 11: mod_base = OTHER; note = guanosine-3'-phosphate
  modified_base 12: mod_base = OTHER; note = adenosine-3'-phosphate
  modified_base 13: mod_base = OTHER; note = cytidine-3'-phosphate
  modified_base 14: mod_base = OTHER; note = uridine-3'-phosphate
  modified_base 15: mod_base = OTHER; note = guanosine-3'-phosphate
  modified_base 16: mod_base = OTHER; note = cytidine-3'-phosphate
  modified_base 17: mod_base = OTHER; note = guanosine-3'-phosphate
  modified_base 18: mod_base = OTHER; note = adenosine-3'-phosphate
  modified_base 19: mod_base = OTHER; note = guanosine-3'-phosphate
  modified_base 20: mod_base = OTHER; note = 2'-deoxythymidine-3'-phosphorothioate
  misc_feature 1..19: note = RNA
  misc_feature 20..21: note = DNA
agtgcgctctgactgcgagtt

SEQ ID NO: 149 - DNA, 21 bp, synthetic construct
  source 1..21: mol_type = other DNA
  modified_base 1: mod_base = OTHER; note = guanosine-3'-phosphate
  modified_base 2: mod_base = OTHER; note = cytidine-3'-phosphate
  modified_base 3: mod_base = OTHER; note = adenosine-3'-phosphate
  modified_base 4: mod_base = OTHER; note = guanosine-3'-phosphate
  modified_base 5: mod_base = OTHER; note = uridine-3'-phosphate
  modified_base 6: mod_base = OTHER; note = cytidine-3'-phosphate
  modified_base 7: mod_base = OTHER; note = adenosine-3'-phosphate
  modified_base 8: mod_base = OTHER; note = guanosine-3'-phosphate
  modified_base 9: mod_base = OTHER; note = adenosine-3'-phosphate
  modified_base 10: mod_base = OTHER; note = guanosine-3'-phosphate
  modified_base 11: mod_base = OTHER; note = cytidine-3'-phosphate
  modified_base 12: mod_base = OTHER; note = guanosine-3'-phosphate
  modified_base 13: mod_base = OTHER; note = cytidine-3'-phosphate
  modified_base 14: mod_base = OTHER; note = adenosine-3'-phosphate
  modified_base 15: mod_base = OTHER; note = cytidine-3'-phosphate
  modified_base 16: mod_base = OTHER; note = uridine-3'-phosphate
  modified_base 17: mod_base = OTHER; note = guanosine-3'-phosphate
  modified_base 18: mod_base = OTHER; note = cytidine-3'-phosphate
  modified_base 19: mod_base = OTHER; note = cytidine-3'-phosphate
  modified_base 20: mod_base = OTHER; note = 2'-deoxythymidine-3'-phosphorothioate
  misc_feature 1..19: note = RNA
  misc_feature 20..21: note = DNA
gcagtcagagcgcactgcctt

SEQ ID NO: 150 - DNA, 21 bp, synthetic construct
  source 1..21: mol_type = other DNA
  modified_base 1: mod_base = OTHER; note = guanosine-3'-phosphate
  modified_base 2: mod_base = OTHER; note = guanosine-3'-phosphate
  modified_base 3: mod_base = OTHER; note = cytidine-3'-phosphate
  modified_base 4: mod_base = OTHER; note = adenosine-3'-phosphate
  modified_base 5: mod_base = OTHER; note = guanosine-3'-phosphate
  modified_base 6: mod_base = OTHER; note = uridine-3'-phosphate
  modified_base 7: mod_base = OTHER; note = guanosine-3'-phosphate
  modified_base 8: mod_base = OTHER; note = cytidine-3'-phosphate
  modified_base 9: mod_base = OTHER; note = guanosine-3'-phosphate
  modified_base 10: mod_base = OTHER; note = cytidine-3'-phosphate
  modified_base 11: mod_base = OTHER; note = uridine-3'-phosphate
  modified_base 12: mod_base = OTHER; note = cytidine-3'-phosphate
  modified_base 13: mod_base = OTHER; note = uridine-3'-phosphate
  modified_base 14: mod_base = OTHER; note = guanosine-3'-phosphate
  modified_base 15: mod_base = OTHER; note = adenosine-3'-phosphate
  modified_base 16: mod_base = OTHER; note = cytidine-3'-phosphate
  modified_base 17: mod_base = OTHER; note = uridine-3'-phosphate
  modified_base 18: mod_base = OTHER; note = guanosine-3'-phosphate
  modified_base 19: mod_base = OTHER; note = cytidine-3'-phosphate
  modified_base 20: mod_base = OTHER; note = 2'-deoxythymidine-3'-phosphorothioate
  misc_feature 1..19: note = RNA
  misc_feature 20..21: note = DNA
ggcagtgcgctctgactgctt

SEQ ID NO: 151 - DNA, 21 bp, synthetic construct
  source 1..21: mol_type = other DNA
  modified_base 1: mod_base = OTHER; note = guanosine-3'-phosphate
  modified_base 2: mod_base = OTHER; note = 2'-O-methylcytidine-3'-phosphate
  modified_base 3: mod_base = OTHER; note = adenosine-3'-phosphate
  modified_base 4: mod_base = OTHER; note = guanosine-3'-phosphate
  modified_base 5: mod_base = OTHER; note = 2'-O-methyluridine-3'-phosphate
  modified_base 6: mod_base = OTHER; note = 2'-O-methylcytidine-3'-phosphate
  modified_base 7: mod_base = OTHER; note = adenosine-3'-phosphate
  modified_base 8: mod_base = OTHER; note = guanosine-3'-phosphate
  modified_base 9: mod_base = OTHER; note = adenosine-3'-phosphate
  modified_base 10: mod_base = OTHER; note = guanosine-3'-phosphate
  modified_base 11: mod_base = OTHER; note = 2'-O-methylcytidine-3'-phosphate
  modified_base 12: mod_base = OTHER; note = guanosine-3'-phosphate
  modified_base 13: mod_base = OTHER; note = 2'-O-methylcytidine-3'-phosphate
  modified_base 14: mod_base = OTHER; note = adenosine-3'-phosphate
  modified_base 15: mod_base = OTHER; note = 2'-O-methylcytidine-3'-phosphate
  modified_base 16: mod_base = OTHER; note = 2'-O-methyluridine-3'-phosphate
  modified_base 17: mod_base = OTHER; note = guanosine-3'-phosphate
  modified_base 18: mod_base = OTHER; note = 2'-O-methylcytidine-3'-phosphate
  modified_base 19: mod_base = OTHER; note = 2'-O-methylcytidine-3'-phosphate
  modified_base 20: mod_base = OTHER; note = 2'-deoxythymidine-3'-phosphorothioate
  misc_feature 1..19: note = RNA
  misc_feature 20..21: note = DNA
gcagtcagagcgcactgcctt

SEQ ID NO: 152 - DNA, 21 bp, synthetic construct
  source 1..21: mol_type = other DNA
  modified_base 1: mod_base = OTHER; note = guanosine-3'-phosphate
  modified_base 2: mod_base = OTHER; note = guanosine-3'-phosphate
  modified_base 3: mod_base = OTHER; note = 2'-O-methylcytidine-3'-phosphate
  modified_base 4: mod_base = OTHER; note = adenosine-3'-phosphate
  modified_base 5: mod_base = OTHER; note = guanosine-3'-phosphate
  modified_base 6: mod_base = OTHER; note = uridine-3'-phosphate
  modified_base 7: mod_base = OTHER; note = guanosine-3'-phosphate
  modified_base 8: mod_base = OTHER; note = cytidine-3'-phosphate
  modified_base 9: mod_base = OTHER; note = guanosine-3'-phosphate
  modified_base 10: mod_base = OTHER; note = cytidine-3'-phosphate
  modified_base 11: mod_base = OTHER; note = uridine-3'-phosphate
  modified_base 12: mod_base = OTHER; note = cytidine-3'-phosphate
  modified_base 13: mod_base = OTHER; note = uridine-3'-phosphate
  modified_base 14: mod_base = OTHER; note = guanosine-3'-phosphate
  modified_base 15: mod_base = OTHER; note = adenosine-3'-phosphate
  modified_base 16: mod_base = OTHER; note = cytidine-3'-phosphate
  modified_base 17: mod_base = OTHER; note = uridine-3'-phosphate
  modified_base 18: mod_base = OTHER; note = guanosine-3'-phosphate
  modified_base 19: mod_base = OTHER; note = cytidine-3'-phosphate
  modified_base 20: mod_base = OTHER; note = 2'-deoxythymidine-3'-phosphorothioate
  misc_feature 1..19: note = RNA
  misc_feature 20..21: note = DNA
ggcagtgcgctctgactgctt

SEQ ID NO: 153 - DNA, 21 bp, synthetic construct
  source 1..21: mol_type = other DNA
  modified_base 1: mod_base = OTHER; note = guanosine-3'-phosphate
  modified_base 2: mod_base = OTHER; note = guanosine-3'-phosphate
  modified_base 3: mod_base = OTHER; note = guanosine-3'-phosphate
  modified_base 4: mod_base = OTHER; note = adenosine-3'-phosphate
  modified_base 5: mod_base = OTHER; note = uridine-3'-phosphate
  modified_base 6: mod_base = OTHER; note = adenosine-3'-phosphate
  modified_base 7: mod_base = OTHER; note = cytidine-3'-phosphate
  modified_base 8: mod_base = OTHER; note = cytidine-3'-phosphate
  modified_base 9: mod_base = OTHER; note = uridine-3'-phosphate
  modified_base 10: mod_base = OTHER; note = cytidine-3'-phosphate
  modified_base 11: mod_base = OTHER; note = adenosine-3'-phosphate
  modified_base 12: mod_base = OTHER; note = cytidine-3'-phosphate
  modified_base 13: mod_base = OTHER; note = cytidine-3'-phosphate
  modified_base 14: mod_base = OTHER; note = adenosine-3'-phosphate
  modified_base 15: mod_base = OTHER; note = adenosine-3'-phosphate
  modified_base 16: mod_base = OTHER; note = guanosine-3'-phosphate
  modified_base 17: mod_base = OTHER; note = adenosine-3'-phosphate
  modified_base 18: mod_base = OTHER; note = uridine-3'-phosphate
  modified_base 19: mod_base = OTHER; note = cytidine-3'-phosphate
  modified_base 20: mod_base = OTHER; note = 2'-deoxythymidine-3'-phosphorothioate
  misc_feature 1..19: note = RNA
  misc_feature 20..21: note = DNA
gggatacctcaccaagatctt

SEQ ID NO: 154 - DNA, 21 bp, synthetic construct
  source 1..21: mol_type = other DNA
  modified_base 1: mod_base = OTHER; note = guanosine-3'-phosphate
  modified_base 2: mod_base = OTHER; note = adenosine-3'-phosphate
  modified_base 3: mod_base = OTHER; note = uridine-3'-phosphate
  modified_base 4: mod_base = OTHER; note = cytidine-3'-phosphate
  modified_base 5: mod_base = OTHER; note = uridine-3'-phosphate
  modified_base 6: mod_base = OTHER; note = uridine-3'-phosphate
  modified_base 7: mod_base = OTHER; note = guanosine-3'-phosphate
  modified_base 8: mod_base = OTHER; note = guanosine-3'-phosphate
  modified_base 9: mod_base = OTHER; note = uridine-3'-phosphate
  modified_base 10: mod_base = OTHER; note = guanosine-3'-phosphate
  modified_base 11: mod_base = OTHER; note = adenosine-3'-phosphate
  modified_base 12: mod_base = OTHER; note = guanosine-3'-phosphate
  modified_base 13: mod_base = OTHER; note = guanosine-3'-phosphate
  modified_base 14: mod_base = OTHER; note = uridine-3'-phosphate
  modified_base 15: mod_base = OTHER; note = adenosine-3'-phosphate
  modified_base 16: mod_base = OTHER; note = uridine-3'-phosphate
  modified_base 17: mod_base = OTHER; note = cytidine-3'-phosphate
  modified_base 18: mod_base = OTHER; note = cytidine-3'-phosphate
  modified_base 19: mod_base = OTHER; note = cytidine-3'-phosphate
  modified_base 20: mod_base = OTHER; note = 2'-deoxythymidine-3'-phosphorothioate
  misc_feature 1..19: note = RNA
  misc_feature 20..21: note = DNA
gatcttggtgaggtatccctt

SEQ ID NO: 155 - DNA, 21 bp, synthetic construct
  source 1..21: mol_type = other DNA
  modified_base 1: mod_base = OTHER; note = guanosine-3'-phosphate
  modified_base 2: mod_base = OTHER; note = guanosine-3'-phosphate
  modified_base 3: mod_base = OTHER; note = guanosine-3'-phosphate
  modified_base 4: mod_base = OTHER; note = adenosine-3'-phosphate
  modified_base 5: mod_base = OTHER; note = 2'-O-methyluridine-3'-phosphate
  modified_base 6: mod_base = OTHER; note = adenosine-3'-phosphate
  modified_base 7: mod_base = OTHER; note = 2'-O-methylcytidine-3'-phosphate
  modified_base 8: mod_base = OTHER; note = 2'-O-methylcytidine-3'-phosphate
  modified_base 9: mod_base = OTHER; note = 2'-O-methyluridine-3'-phosphate
  modified_base 10: mod_base = OTHER; note = 2'-O-methylcytidine-3'-phosphate
  modified_base 11: mod_base = OTHER; note = adenosine-3'-phosphate
  modified_base 12: mod_base = OTHER; note = 2'-O-methylcytidine-3'-phosphate
  modified_base 13: mod_base = OTHER; note = 2'-O-methylcytidine-3'-phosphate
  modified_base 14: mod_base = OTHER; note = adenosine-3'-phosphate
  modified_base 15: mod_base = OTHER; note = adenosine-3'-phosphate
  modified_base 16: mod_base = OTHER; note = guanosine-3'-phosphate
  modified_base 17: mod_base = OTHER; note = adenosine-3'-phosphate
  modified_base 18: mod_base = OTHER; note = 2'-O-methyluridine-3'-phosphate
  modified_base 19: mod_base = OTHER; note = 2'-O-methylcytidine-3'-phosphate
  modified_base 20: mod_base = OTHER; note = 2'-deoxythymidine-3'-phosphorothioate
  misc_feature 1..19: note = RNA
  misc_feature 20..21: note = DNA
gggatacctcaccaagatctt

SEQ ID NO: 156 - DNA, 21 bp, synthetic construct
  source 1..21: mol_type = other DNA
  modified_base 1: mod_base = OTHER; note = guanosine-3'-phosphate
  modified_base 2: mod_base = OTHER; note = adenosine-3'-phosphate
  modified_base 3: mod_base = OTHER; note = uridine-3'-phosphate
  modified_base 4: mod_base = OTHER; note = cytidine-3'-phosphate
  modified_base 5: mod_base = OTHER; note = uridine-3'-phosphate
  modified_base 6: mod_base = OTHER; note = uridine-3'-phosphate
  modified_base 7: mod_base = OTHER; note = guanosine-3'-phosphate
  modified_base 8: mod_base = OTHER; note = guanosine-3'-phosphate
  modified_base 9: mod_base = OTHER; note = uridine-3'-phosphate
  modified_base 10: mod_base = OTHER; note = guanosine-3'-phosphate
  modified_base 11: mod_base = OTHER; note = adenosine-3'-phosphate
  modified_base 12: mod_base = OTHER; note = guanosine-3'-phosphate
  modified_base 13: mod_base = OTHER; note = guanosine-3'-phosphate
  modified_base 14: mod_base = OTHER; note = 2'-O-methyluridine-3'-phosphate
  modified_base 15: mod_base = OTHER; note = adenosine-3'-phosphate
  modified_base 16: mod_base = OTHER; note = uridine-3'-phosphate
  modified_base 17: mod_base = OTHER; note = cytidine-3'-phosphate
  modified_base 18: mod_base = OTHER; note = cytidine-3'-phosphate
  modified_base 19: mod_base = OTHER; note = cytidine-3'-phosphate
  modified_base 20: mod_base = OTHER; note = 2'-deoxythymidine-3'-phosphorothioate
  misc_feature 1..19: note = RNA
  misc_feature 20..21: note = DNA
gatcttggtgaggtatccctt

SEQ ID NO: 157 - DNA, 21 bp, synthetic construct
  source 1..21: mol_type = other DNA
  modified_base 1: mod_base = OTHER; note = uridine-3'-phosphate
  modified_base 2: mod_base = OTHER; note = guanosine-3'-phosphate
  modified_base 3: mod_base = OTHER; note = guanosine-3'-phosphate
  modified_base 4: mod_base = OTHER; note = uridine-3'-phosphate
  modified_base 5: mod_base = OTHER; note = guanosine-3'-phosphate
  modified_base 6: mod_base = OTHER; note = adenosine-3'-phosphate
  modified_base 7: mod_base = OTHER; note = adenosine-3'-phosphate
  modified_base 8: mod_base = OTHER; note = guanosine-3'-phosphate
  modified_base 9: mod_base = OTHER; note = adenosine-3'-phosphate
  modified_base 10: mod_base = OTHER; note = uridine-3'-phosphate
  modified_base 11: mod_base = OTHER; note = guanosine-3'-phosphate
  modified_base 12: mod_base = OTHER; note = adenosine-3'-phosphate
  modified_base 13: mod_base = OTHER; note = guanosine-3'-phosphate
  modified_base 14: mod_base = OTHER; note = uridine-3'-phosphate
  modified_base 15: mod_base = OTHER; note = guanosine-3'-phosphate
  modified_base 16: mod_base = OTHER; note = guanosine-3'-phosphate
  modified_base 17: mod_base = OTHER; note = cytidine-3'-phosphate
  modified_base 18: mod_base = OTHER; note = guanosine-3'-phosphate
  modified_base 19: mod_base = OTHER; note = adenosine-3'-phosphate
  modified_base 20: mod_base = OTHER; note = 2'-deoxythymidine-3'-phosphorothioate
  misc_feature 1..19: note = RNA
  misc_feature 20..21: note = DNA
tggtgaagatgagtggcgatt

SEQ ID NO: 158 - DNA, 21 bp, synthetic construct
  source 1..21: mol_type = other DNA
  modified_base 1: mod_base = OTHER; note = uridine-3'-phosphate
  modified_base 2: mod_base = OTHER; note = cytidine-3'-phosphate
  modified_base 3: mod_base = OTHER; note = guanosine-3'-phosphate
  modified_base 4: mod_base = OTHER; note = cytidine-3'-phosphate
  modified_base 5: mod_base = OTHER; note = cytidine-3'-phosphate
  modified_base 6: mod_base = OTHER; note = adenosine-3'-phosphate
  modified_base 7: mod_base = OTHER; note = cytidine-3'-phosphate
  modified_base 8: mod_base = OTHER; note = uridine-3'-phosphate
  modified_base 9: mod_base = OTHER; note = cytidine-3'-phosphate
  modified_base 10: mod_base = OTHER; note = adenosine-3'-phosphate
  modified_base 11: mod_base = OTHER; note = uridine-3'-phosphate
  modified_base 12: mod_base = OTHER; note = cytidine-3'-phosphate
  modified_base 13: mod_base = OTHER; note = uridine-3'-phosphate
  modified_base 14: mod_base = OTHER; note = uridine-3'-phosphate
  modified_base 15: mod_base = OTHER; note = cytidine-3'-phosphate
  modified_base 16: mod_base = OTHER; note = adenosine-3'-phosphate
  modified_base 17: mod_base = OTHER; note = cytidine-3'-phosphate
  modified_base 18: mod_base = OTHER; note = cytidine-3'-phosphate
  modified_base 19: mod_base = OTHER; note = adenosine-3'-phosphate
  modified_base 20: mod_base = OTHER; note = 2'-deoxythymidine-3'-phosphorothioate
  misc_feature 1..19: note = RNA
  misc_feature 20..21: note = DNA
tcgccactcatcttcaccatt

SEQ ID NO: 159 - DNA, 21 bp, synthetic construct
  source 1..21: mol_type = other DNA
  modified_base 1: mod_base = OTHER; note = 2'-O-methyluridine-3'-phosphate
  modified_base 2: mod_base = OTHER; note = guanosine-3'-phosphate
  modified_base 3: mod_base = OTHER; note = guanosine-3'-phosphate
  modified_base 4: mod_base = OTHER; note = 2'-O-methyluridine-3'-phosphate
  modified_base 5: mod_base = OTHER; note = guanosine-3'-phosphate
  modified_base 6: mod_base = OTHER; note = adenosine-3'-phosphate
  modified_base 7: mod_base = OTHER; note = adenosine-3'-phosphate
  modified_base 8: mod_base = OTHER; note = guanosine-3'-phosphate
  modified_base 9: mod_base = OTHER; note = adenosine-3'-phosphate
  modified_base 10: mod_base = OTHER; note = 2'-O-methyluridine-3'-phosphate
  modified_base 11: mod_base = OTHER; note = guanosine-3'-phosphate
  modified_base 12: mod_base = OTHER; note = adenosine-3'-phosphate
  modified_base 13: mod_base = OTHER; note = guanosine-3'-phosphate
  modified_base 14: mod_base = OTHER; note = 2'-O-methyluridine-3'-phosphate
  modified_base 15: mod_base = OTHER; note = guanosine-3'-phosphate
  modified_base 16: mod_base = OTHER; note = guanosine-3'-phosphate
  modified_base 17: mod_base = OTHER; note = 2'-O-methylcytidine-3'-phosphate
  modified_base 18: mod_base = OTHER; note = guanosine-3'-phosphate
  modified_base 19: mod_base = OTHER; note = adenosine-3'-phosphate
  modified_base 20: mod_base = OTHER; note = 2'-deoxythymidine-3'-phosphorothioate
  misc_feature 1..19: note = RNA
  misc_feature 20..21: note = DNA
tggtgaagatgagtggcgatt

SEQ ID NO: 160 - DNA, 21 bp, synthetic construct
  source 1..21: mol_type = other DNA
  modified_base 1: mod_base = OTHER; note = uridine-3'-phosphate
  modified_base 2: mod_base = OTHER; note = cytidine-3'-phosphate
  modified_base 3: mod_base = OTHER; note = guanosine-3'-phosphate
  modified_base 4: mod_base = OTHER; note = cytidine-3'-phosphate
  modified_base 5: mod_base = OTHER; note = 2'-O-methylcytidine-3'-phosphate
  modified_base 6: mod_base = OTHER; note = adenosine-3'-phosphate
  modified_base 7: mod_base = OTHER; note = cytidine-3'-phosphate
  modified_base 8: mod_base = OTHER; note = uridine-3'-phosphate
  modified_base 9: mod_base = OTHER; note = 2'-O-methylcytidine-3'-phosphate
  modified_base 10: mod_base = OTHER; note = adenosine-3'-phosphate
  modified_base 11: mod_base = OTHER; note = uridine-3'-phosphate
  modified_base 12: mod_base = OTHER; note = cytidine-3'-phosphate
  modified_base 13: mod_base = OTHER; note = uridine-3'-phosphate
  modified_base 14: mod_base = OTHER; note = uridine-3'-phosphate
  modified_base 15: mod_base = OTHER; note = 2'-O-methylcytidine-3'-phosphate
  modified_base 16: mod_base = OTHER; note = adenosine-3'-phosphate
  modified_base 17: mod_base = OTHER; note = cytidine-3'-phosphate
  modified_base 18: mod_base = OTHER; note = 2'-O-methylcytidine-3'-phosphate
  modified_base 19: mod_base = OTHER; note = adenosine-3'-phosphate
  modified_base 20: mod_base = OTHER; note = 2'-deoxythymidine-3'-phosphorothioate
  misc_feature 1..19: note = RNA
  misc_feature 20..21: note = DNA
tcgccactcatcttcaccatt

SEQ ID NO: 161 - DNA, 21 bp, synthetic construct
  source 1..21: mol_type = other DNA
  modified_base 1: mod_base = OTHER; note = guanosine-3'-phosphate
  modified_base 2: mod_base = OTHER; note = adenosine-3'-phosphate
  modified_base 3: mod_base = OTHER; note = adenosine-3'-phosphate
  modified_base 4: mod_base = OTHER; note = guanosine-3'-phosphate
  modified_base 5: mod_base = OTHER; note = adenosine-3'-phosphate
  modified_base 6: mod_base = OTHER; note = uridine-3'-phosphate
  modified_base 7: mod_base = OTHER; note = guanosine-3'-phosphate
  modified_base 8: mod_base = OTHER; note = adenosine-3'-phosphate
  modified_base 9: mod_base = OTHER; note = guanosine-3'-phosphate
  modified_base 10: mod_base = OTHER; note = uridine-3'-phosphate
  modified_base 11: mod_base = OTHER; note = guanosine-3'-phosphate
  modified_base 12: mod_base = OTHER; note = guanosine-3'-phosphate
  modified_base 13: mod_base = OTHER; note = cytidine-3'-phosphate
  modified_base 14: mod_base = OTHER; note = guanosine-3'-phosphate
  modified_base 15: mod_base = OTHER; note = adenosine-3'-phosphate
  modified_base 16: mod_base = OTHER; note = cytidine-3'-phosphate
  modified_base 17: mod_base = OTHER; note = cytidine-3'-phosphate
  modified_base 18: mod_base = OTHER; note = uridine-3'-phosphate
  modified_base 19: mod_base = OTHER; note = guanosine-3'-phosphate
  modified_base 20: mod_base = OTHER; note = 2'-deoxythymidine-3'-phosphorothioate
  misc_feature 1..19: note = RNA
  misc_feature 20..21: note = DNA
gaagatgagtggcgacctgtt

SEQ ID NO: 162 - DNA, 21 bp, synthetic construct
  source 1..21: mol_type = other DNA
  modified_base 1: mod_base = OTHER; note = cytidine-3'-phosphate
  modified_base 2: mod_base = OTHER; note = adenosine-3'-phosphate
  modified_base 3: mod_base = OTHER; note = guanosine-3'-phosphate
  modified_base 4: mod_base = OTHER; note = guanosine-3'-phosphate
  modified_base 5: mod_base = OTHER; note = uridine-3'-phosphate
  modified_base 6: mod_base = OTHER; note = cytidine-3'-phosphate
  modified_base 7: mod_base = OTHER; note = guanosine-3'-phosphate
  modified_base 8: mod_base = OTHER; note = cytidine-3'-phosphate
  modified_base 9: mod_base = OTHER; note = cytidine-3'-phosphate
  modified_base 10: mod_base = OTHER; note = adenosine-3'-phosphate
  modified_base 11: mod_base = OTHER; note = cytidine-3'-phosphate
  modified_base 12: mod_base = OTHER; note = uridine-3'-phosphate
  modified_base 13: mod_base = OTHER; note = cytidine-3'-phosphate
  modified_base 14: mod_base = OTHER; note = adenosine-3'-phosphate
  modified_base 15: mod_base = OTHER; note = uridine-3'-phosphate
  modified_base 16: mod_base = OTHER; note = cytidine-3'-phosphate
  modified_base 17: mod_base = OTHER; note = uridine-3'-phosphate
  modified_base 18: mod_base = OTHER; note = uridine-3'-phosphate
  modified_base 19: mod_base = OTHER; note = cytidine-3'-phosphate
  modified_base 20: mod_base = OTHER; note = 2'-deoxythymidine-3'-phosphorothioate
  misc_feature 1..19: note = RNA
  misc_feature 20..21: note = DNA
caggtcgccactcatcttctt

SEQ ID NO: 163 - DNA, 21 bp, synthetic construct
  source 1..21: mol_type = other DNA
  modified_base 1: mod_base = OTHER; note = guanosine-3'-phosphate
  modified_base 2: mod_base = OTHER; note = adenosine-3'-phosphate
  modified_base 3: mod_base = OTHER; note = adenosine-3'-phosphate
  modified_base 4: mod_base = OTHER; note = guanosine-3'-phosphate
  modified_base 5: mod_base = OTHER; note = adenosine-3'-phosphate
  modified_base 6: mod_base = OTHER; note = 2'-O-methyluridine-3'-phosphate
  modified_base 7: mod_base = OTHER; note = guanosine-3'-phosphate
  modified_base 8: mod_base = OTHER; note = adenosine-3'-phosphate
  modified_base 9: mod_base = OTHER; note = guanosine-3'-phosphate
  modified_base 10: mod_base = OTHER; note = 2'-O-methyluridine-3'-phosphate
  modified_base 11: mod_base = OTHER; note = guanosine-3'-phosphate
  modified_base 12: mod_base = OTHER; note = guanosine-3'-phosphate
  modified_base 13: mod_base = OTHER; note = 2'-O-methylcytidine-3'-phosphate
  modified_base 14: mod_base = OTHER; note = guanosine-3'-phosphate
  modified_base 15: mod_base = OTHER; note = adenosine-3'-phosphate
  modified_base 16: mod_base = OTHER; note = 2'-O-methylcytidine-3'-phosphate
  modified_base 17: mod_base = OTHER; note = 2'-O-methylcytidine-3'-phosphate
  modified_base 18: mod_base = OTHER; note = 2'-O-methyluridine-3'-phosphate
  modified_base 19: mod_base = OTHER; note = guanosine-3'-phosphate
  modified_base 20: mod_base = OTHER; note = 2'-deoxythymidine-3'-phosphorothioate
  misc_feature 1..19: note = RNA
  misc_feature 20..21: note = DNA
gaagatgagtggcgacctgtt

SEQ ID NO: 164 - DNA, 21 bp, synthetic construct
  source 1..21: mol_type = other DNA
  modified_base 1: mod_base = OTHER; note = 2'-O-methylcytidine-3'-phosphate
  modified_base 2: mod_base = OTHER; note = adenosine-3'-phosphate
  modified_base 3: mod_base = OTHER; note = guanosine-3'-phosphate
  modified_base 4: mod_base = OTHER; note = guanosine-3'-phosphate
  modified_base 5: mod_base = OTHER; note = uridine-3'-phosphate
  modified_base 6: mod_base = OTHER; note = cytidine-3'-phosphate
  modified_base 7: mod_base = OTHER; note = guanosine-3'-phosphate
  modified_base 8: mod_base = OTHER; note = cytidine-3'-phosphate
  modified_base 9: mod_base = OTHER; note = 2'-O-methylcytidine-3'-phosphate
  modified_base 10: mod_base = OTHER; note = adenosine-3'-phosphate
  modified_base 11: mod_base = OTHER; note = cytidine-3'-phosphate
  modified_base 12: mod_base = OTHER; note = uridine-3'-phosphate
  modified_base 13: mod_base = OTHER; note = 2'-O-methylcytidine-3'-phosphate
  modified_base 14: mod_base = OTHER; note = adenosine-3'-phosphate
  modified_base 15: mod_base = OTHER; note = uridine-3'-phosphate
  modified_base 16: mod_base = OTHER; note = cytidine-3'-phosphate
  modified_base 17: mod_base = OTHER; note = uridine-3'-phosphate
  modified_base 18: mod_base = OTHER; note = uridine-3'-phosphate
  modified_base 19: mod_base = OTHER; note = cytidine-3'-phosphate
  modified_base 20: mod_base = OTHER; note = 2'-deoxythymidine-3'-phosphorothioate
  misc_feature 1..19: note = RNA
  misc_feature 20..21: note = DNA
caggtcgccactcatcttctt

SEQ ID NO: 165 - DNA, 21 bp, synthetic construct
  source 1..21: mol_type = other DNA
  modified_base 1: mod_base = OTHER; note = cytidine-3'-phosphate
  modified_base 2: mod_base = OTHER; note = cytidine-3'-phosphate
  modified_base 3: mod_base = OTHER; note = cytidine-3'-phosphate
  modified_base 4: mod_base = OTHER; note = adenosine-3'-phosphate
  modified_base 5: mod_base = OTHER; note = uridine-3'-phosphate
  modified_base 6: mod_base = OTHER; note = guanosine-3'-phosphate
  modified_base 7: mod_base = OTHER; note = uridine-3'-phosphate
  modified_base 8: mod_base = OTHER; note = cytidine-3'-phosphate
  modified_base 9: mod_base = OTHER; note = guanosine-3'-phosphate
  modified_base 10: mod_base = OTHER; note = adenosine-3'-phosphate
  modified_base 11: mod_base = OTHER; note = cytidine-3'-phosphate
  modified_base 12: mod_base = OTHER; note = uridine-3'-phosphate
  modified_base 13: mod_base = OTHER; note = adenosine-3'-phosphate
  modified_base 14: mod_base = OTHER; note = cytidine-3'-phosphate
  modified_base 15: mod_base = OTHER; note = adenosine-3'-phosphate
  modified_base 16: mod_base = OTHER; note = uridine-3'-phosphate
  modified_base 17: mod_base = OTHER; note = cytidine-3'-phosphate
  modified_base 18: mod_base = OTHER; note = guanosine-3'-phosphate
  modified_base 19: mod_base = OTHER; note = adenosine-3'-phosphate
  modified_base 20: mod_base = OTHER; note = 2'-deoxythymidine-3'-phosphorothioate
  misc_feature 1..19: note = RNA
  misc_feature 20..21: note = DNA
cccatgtcgactacatcgatt

SEQ ID NO: 166 - DNA, 21 bp, synthetic construct
  source 1..21: mol_type = other DNA
  modified_base 1: mod_base = OTHER; note = uridine-3'-phosphate
  modified_base 2: mod_base = OTHER; note = cytidine-3'-phosphate
  modified_base 3: mod_base = OTHER; note = guanosine-3'-phosphate
  modified_base 4: mod_base = OTHER; note = adenosine-3'-phosphate
  modified_base 5: mod_base = OTHER; note = uridine-3'-phosphate
  modified_base 6: mod_base = OTHER; note = guanosine-3'-phosphate
  modified_base 7: mod_base = OTHER; note = uridine-3'-phosphate
  modified_base 8: mod_base = OTHER; note = adenosine-3'-phosphate
  modified_base 9: mod_base = OTHER; note = guanosine-3'-phosphate
  modified_base 10: mod_base = OTHER; note = uridine-3'-phosphate
  modified_base 11: mod_base = OTHER; note = cytidine-3'-phosphate
  modified_base 12: mod_base = OTHER; note = guanosine-3'-phosphate
  modified_base 13: mod_base = OTHER; note = adenosine-3'-phosphate
  modified_base 14: mod_base = OTHER; note = cytidine-3'-phosphate
  modified_base 15: mod_base = OTHER; note = adenosine-3'-phosphate
  modified_base 16: mod_base = OTHER; note = uridine-3'-phosphate
  modified_base 17: mod_base = OTHER; note = guanosine-3'-phosphate
  modified_base 18: mod_base = OTHER; note = guanosine-3'-phosphate
  modified_base 19: mod_base = OTHER; note = guanosine-3'-phosphate
  modified_base 20: mod_base = OTHER; note = 2'-deoxythymidine-3'-phosphorothioate
  misc_feature 1..19: note = RNA
  misc_feature 20..21: note = DNA
tcgatgtagtcgacatgggtt

SEQ ID NO: 167 - DNA, 21 bp, synthetic construct
  source 1..21: mol_type = other DNA
  modified_base 1: mod_base = OTHER; note = 2'-O-methylcytidine-3'-phosphate
  modified_base 2: mod_base = OTHER; note = 2'-O-methylcytidine-3'-phosphate
  modified_base 3: mod_base = OTHER; note = 2'-O-methylcytidine-3'-phosphate
  modified_base 4: mod_base = OTHER; note = adenosine-3'-phosphate
  modified_base 5: mod_base = OTHER; note = 2'-O-methyluridine-3'-phosphate
  modified_base 6: mod_base = OTHER; note = guanosine-3'-phosphate
  modified_base 7: mod_base = OTHER; note = 2'-O-methyluridine-3'-phosphate
  modified_base 8: mod_base = OTHER; note = 2'-O-methylcytidine-3'-phosphate
  modified_base 9: mod_base = OTHER; note = guanosine-3'-phosphate
  modified_base 10: mod_base = OTHER; note = adenosine-3'-phosphate
  modified_base 11: mod_base = OTHER; note = 2'-O-methylcytidine-3'-phosphate
  modified_base 12: mod_base = OTHER; note = 2'-O-methyluridine-3'-phosphate
  modified_base 13: mod_base = OTHER; note = adenosine-3'-phosphate
  modified_base 14: mod_base = OTHER; note = 2'-O-methylcytidine-3'-phosphate
  modified_base 15: mod_base = OTHER; note = adenosine-3'-phosphate
  modified_base 16: mod_base = OTHER; note = 2'-O-methyluridine-3'-phosphate
  modified_base 17: mod_base = OTHER; note = 2'-O-methylcytidine-3'-phosphate
  modified_base 18: mod_base = OTHER; note = guanosine-3'-phosphate
  modified_base 19: mod_base = OTHER; note = adenosine-3'-phosphate
  modified_base 20: mod_base = OTHER; note = 2'-deoxythymidine-3'-phosphorothioate
  misc_feature 1..19: note = RNA
  misc_feature 20..21: note = DNA
cccatgtcgactacatcgatt

SEQ ID NO: 168 - DNA, 21 bp, synthetic construct
  source 1..21: mol_type = other DNA
  modified_base 1: mod_base = OTHER; note = uridine-3'-phosphate
  modified_base 2: mod_base = OTHER; note = cytidine-3'-phosphate
  modified_base 3: mod_base = OTHER; note = guanosine-3'-phosphate
  modified_base 4: mod_base = OTHER; note = adenosine-3'-phosphate
  modified_base 5: mod_base = OTHER; note = uridine-3'-phosphate
  modified_base 6: mod_base = OTHER; note = guanosine-3'-phosphate
  modified_base 7: mod_base = OTHER; note = 2'-O-methyluridine-3'-phosphate
  modified_base 8: mod_base = OTHER; note = adenosine-3'-phosphate
  modified_base 9: mod_base = OTHER; note = guanosine-3'-phosphate
  modified_base 10: mod_base = OTHER; note = uridine-3'-phosphate
  modified_base 11: mod_base = OTHER; note = cytidine-3'-phosphate
  modified_base 12: mod_base = OTHER; note = guanosine-3'-phosphate
  modified_base 13: mod_base = OTHER; note = adenosine-3'-phosphate
  modified_base 14: mod_base = OTHER; note = 2'-O-methylcytidine-3'-phosphate
  modified_base 15: mod_base = OTHER; note = adenosine-3'-phosphate
  modified_base 16: mod_base = OTHER; note = uridine-3'-phosphate
  modified_base 17: mod_base = OTHER; note = guanosine-3'-phosphate
  modified_base 18: mod_base = OTHER; note = guanosine-3'-phosphate
  modified_base 19: mod_base = OTHER; note = guanosine-3'-phosphate
  modified_base 20: mod_base = OTHER; note = 2'-deoxythymidine-3'-phosphorothioate
  misc_feature 1..19: note = RNA
  misc_feature 20..21: note = DNA
tcgatgtagtcgacatgggtt

SEQ ID NO: 169 - DNA, 21 bp, synthetic construct
  source 1..21: mol_type = other DNA
  modified_base 1: mod_base = OTHER; note = adenosine-3'-phosphate
  modified_base 2: mod_base = OTHER; note = uridine-3'-phosphate
  modified_base 3: mod_base = OTHER; note = cytidine-3'-phosphate
  modified_base 4: mod_base = OTHER; note = guanosine-3'-phosphate
  modified_base 5: mod_base = OTHER; note = adenosine-3'-phosphate
  modified_base 6: mod_base = OTHER; note = guanosine-3'-phosphate
  modified_base 7: mod_base = OTHER; note = guanosine-3'-phosphate
  modified_base 8: mod_base = OTHER; note = adenosine-3'-phosphate
  modified_base 9: mod_base = OTHER; note = guanosine-3'-phosphate
  modified_base 10: mod_base = OTHER; note = guanosine-3'-phosphate
  modified_base 11: mod_base = OTHER; note = adenosine-3'-phosphate
  modified_base 12: mod_base = OTHER; note = cytidine-3'-phosphate
  modified_base 13: mod_base = OTHER; note = uridine-3'-phosphate
  modified_base 14: mod_base = OTHER; note = cytidine-3'-phosphate
  modified_base 15: mod_base = OTHER; note = cytidine-3'-phosphate
  modified_base 16: mod_base = OTHER; note = uridine-3'-phosphate
  modified_base 17: mod_base = OTHER; note = cytidine-3'-phosphate
  modified_base 18: mod_base = OTHER; note = uridine-3'-phosphate
  modified_base 19: mod_base = OTHER; note = guanosine-3'-phosphate
  modified_base 20: mod_base = OTHER; note = 2'-deoxythymidine-3'-phosphorothioate
  misc_feature 1..19: note = RNA
  misc_feature 20..21: note = DNA
atcgaggaggactcctctgtt

SEQ ID NO: 170 - DNA, 21 bp, synthetic construct
  source 1..21: mol_type = other DNA
  modified_base 1: mod_base = OTHER; note = cytidine-3'-phosphate
  modified_base 2: mod_base = OTHER; note = adenosine-3'-phosphate
  modified_base 3: mod_base = OTHER; note = guanosine-3'-phosphate
  modified_base 4: mod_base = OTHER; note = adenosine-3'-phosphate
  modified_base 5: mod_base = OTHER; note = guanosine-3'-phosphate
  modified_base 6: mod_base = OTHER; note = guanosine-3'-phosphate
  modified_base 7: mod_base = OTHER; note = adenosine-3'-phosphate
  modified_base 8: mod_base = OTHER; note = guanosine-3'-phosphate
  modified_base 9: mod_base = OTHER; note = uridine-3'-phosphate
  modified_base 10: mod_base = OTHER; note = cytidine-3'-phosphate
  modified_base 11: mod_base = OTHER; note = cytidine-3'-phosphate
  modified_base 12: mod_base = OTHER; note = uridine-3'-phosphate
  modified_base 13: mod_base = OTHER; note = cytidine-3'-phosphate
  modified_base 14: mod_base = OTHER; note = cytidine-3'-phosphate
  modified_base 15: mod_base = OTHER; note = uridine-3'-phosphate
  modified_base 16: mod_base = OTHER; note = cytidine-3'-phosphate
  modified_base 17: mod_base = OTHER; note = guanosine-3'-phosphate
  modified_base 18: mod_base = OTHER; note = adenosine-3'-phosphate
  modified_base 19: mod_base = OTHER; note = uridine-3'-phosphate
  modified_base 20: mod_base = OTHER; note = 2'-deoxythymidine-3'-phosphorothioate
  misc_feature 1..19: note = RNA
  misc_feature 20..21: note = DNA
cagaggagtcctcctcgattt

SEQ ID NO: 171 - DNA, 21 bp, synthetic construct
  source 1..21: mol_type = other DNA
  modified_base 1: mod_base = OTHER; note = adenosine-3'-phosphate
  modified_base 2: mod_base = OTHER; note = 2'-O-methyluridine-3'-phosphate
  modified_base 3: mod_base = OTHER; note = 2'-O-methylcytidine-3'-phosphate
  modified_base 4: mod_base = OTHER; note = guanosine-3'-phosphate
  modified_base 5: mod_base = OTHER; note = adenosine-3'-phosphate
  modified_base 6: mod_base = OTHER; note = guanosine-3'-phosphate
  modified_base 7: mod_base = OTHER; note = guanosine-3'-phosphate
  modified_base 8: mod_base = OTHER; note = adenosine-3'-phosphate
  modified_base 9: mod_base = OTHER; note = guanosine-3'-phosphate
  modified_base 10: mod_base = OTHER; note = guanosine-3'-phosphate
  modified_base 11: mod_base = OTHER; note = adenosine-3'-phosphate
  modified_base 12: mod_base = OTHER; note = 2'-O-methylcytidine-3'-phosphate
  modified_base 13: mod_base = OTHER; note = 2'-O-methyluridine-3'-phosphate
  modified_base 14: mod_base = OTHER; note = 2'-O-methylcytidine-3'-phosphate
  modified_base 15: mod_base = OTHER; note = 2'-O-methylcytidine-3'-phosphate
  modified_base 16: mod_base = OTHER; note = 2'-O-methyluridine-3'-phosphate
  modified_base 17: mod_base = OTHER; note = 2'-O-methylcytidine-3'-phosphate
  modified_base 18: mod_base = OTHER; note = 2'-O-methyluridine-3'-phosphate
  modified_base 19: mod_base = OTHER; note = guanosine-3'-phosphate
  modified_base 20: mod_base = OTHER; note = 2'-deoxythymidine-3'-phosphorothioate
  misc_feature 1..19: note = RNA
  misc_feature 20..21: note = DNA
atcgaggaggactcctctgtt

SEQ ID NO: 172 - DNA, 21 bp, synthetic construct
  source 1..21: mol_type = other DNA
  modified_base 1: mod_base = OTHER; note = 2'-O-methylcytidine-3'-phosphate
  modified_base 2: mod_base = OTHER; note = adenosine-3'-phosphate
  modified_base 3: mod_base = OTHER; note = guanosine-3'-phosphate
  modified_base 4: mod_base = OTHER; note = adenosine-3'-phosphate
  modified_base 5: mod_base = OTHER; note = guanosine-3'-phosphate
  modified_base 6: mod_base = OTHER; note = guanosine-3'-phosphate
  modified_base 7: mod_base = OTHER; note = adenosine-3'-phosphate
  modified_base 8: mod_base = OTHER; note = guanosine-3'-phosphate
  modified_base 9: mod_base = OTHER; note = uridine-3'-phosphate
  modified_base 10: mod_base = OTHER; note = cytidine-3'-phosphate
  modified_base 11: mod_base = OTHER; note = cytidine-3'-phosphate
  modified_base 12: mod_base = OTHER; note = uridine-3'-phosphate
  modified_base 13: mod_base = OTHER; note = cytidine-3'-phosphate
  modified_base 14: mod_base = OTHER; note = cytidine-3'-phosphate
  modified_base 15: mod_base = OTHER; note = uridine-3'-phosphate
  modified_base 16: mod_base = OTHER; note = cytidine-3'-phosphate
  modified_base 17: mod_base = OTHER; note = guanosine-3'-phosphate
  modified_base 18: mod_base = OTHER; note = adenosine-3'-phosphate
  modified_base 19: mod_base = OTHER; note = uridine-3'-phosphate
  modified_base 20: mod_base = OTHER; note = 2'-deoxythymidine-3'-phosphorothioate
  misc_feature 1..19: note = RNA
  misc_feature 20..21: note = DNA
cagaggagtcctcctcgattt

SEQ ID NO: 173 - DNA, 21 bp, synthetic construct
  source 1..21: mol_type = other DNA
  modified_base 1: mod_base = OTHER; note = guanosine-3'-phosphate
  modified_base 2: mod_base = OTHER; note = guanosine-3'-phosphate
  modified_base 3: mod_base = OTHER; note = adenosine-3'-phosphate
  modified_base 4: mod_base = OTHER; note = adenosine-3'-phosphate
  modified_base 5: mod_base = OTHER; note = cytidine-3'-phosphate
  modified_base 6: mod_base = OTHER; note = cytidine-3'-phosphate
  modified_base 7: mod_base = OTHER; note = uridine-3'-phosphate
  modified_base 8: mod_base = OTHER; note = guanosine-3'-phosphate
  modified_base 9: mod_base = OTHER; note = guanosine-3'-phosphate
  modified_base 10: mod_base = OTHER; note = adenosine-3'-phosphate
  modified_base 11: mod_base = OTHER; note = guanosine-3'-phosphate
  modified_base 12: mod_base = OTHER; note = cytidine-3'-phosphate
  modified_base 13: mod_base = OTHER; note = guanosine-3'-phosphate
  modified_base 14: mod_base = OTHER; note = guanosine-3'-phosphate
  modified_base 15: mod_base = OTHER; note = adenosine-3'-phosphate
  modified_base 16: mod_base = OTHER; note = uridine-3'-phosphate
  modified_base 17: mod_base = OTHER; note = uridine-3'-phosphate
  modified_base 18: mod_base = OTHER; note = adenosine-3'-phosphate
  modified_base 19: mod_base = OTHER; note = cytidine-3'-phosphate
  misc_feature 1..19: note = RNA
  misc_feature 20..21: note = DNA
ggaacctggagcggattactt

SEQ ID NO: 174 - DNA, 21 bp, synthetic construct
  source 1..21: mol_type = other DNA
  modified_base 1: mod_base = OTHER; note = guanosine-3'-phosphate
  modified_base 2: mod_base = OTHER; note = uridine-3'-phosphate
  modified_base 3: mod_base = OTHER; note = adenosine-3'-phosphate
  modified_base 4: mod_base = OTHER; note = adenosine-3'-phosphate
  modified_base 5: mod_base = OTHER; note = uridine-3'-phosphate
  modified_base 6: mod_base = OTHER; note = cytidine-3'-phosphate
  modified_base 7: mod_base = OTHER; note = cytidine-3'-phosphate
  modified_base 8: mod_base = OTHER; note = guanosine-3'-phosphate
  modified_base 9: mod_base = OTHER; note = cytidine-3'-phosphate
  modified_base 10: mod_base = OTHER; note = uridine-3'-phosphate
  modified_base 11: mod_base = OTHER; note = cytidine-3'-phosphate
  modified_base 12: mod_base = OTHER; note = cytidine-3'-phosphate
  modified_base 13: mod_base = OTHER; note = adenosine-3'-phosphate
  modified_base 14: mod_base = OTHER; note = guanosine-3'-phosphate
  modified_base 15: mod_base = OTHER; note = guanosine-3'-phosphate
  modified_base 16: mod_base = OTHER; note = uridine-3'-phosphate
  modified_base 17: mod_base = OTHER; note = uridine-3'-phosphate
  modified_base 18: mod_base = OTHER; note = cytidine-3'-phosphate
  modified_base 19: mod_base = OTHER; note = cytidine-3'-phosphate
  misc_feature 1..19: note = RNA
  misc_feature 20..21: note = DNA
gtaatccgctccaggttcctt

SEQ ID NO: 175 - DNA, 21 bp, synthetic construct
  source 1..21: mol_type = other DNA
  modified_base 1: mod_base = OTHER; note = guanosine-3'-phosphate
  modified_base 2: mod_base = OTHER; note = adenosine-3'-phosphate
  modified_base 3: mod_base = OTHER; note = adenosine-3'-phosphate
  modified_base 4: mod_base = OTHER; note = cytidine-3'-phosphate
  modified_base 5: mod_base = OTHER; note = cytidine-3'-phosphate
  modified_base 6: mod_base = OTHER; note = uridine-3'-phosphate
  modified_base 7: mod_base = OTHER; note = guanosine-3'-phosphate
  modified_base 8: mod_base = OTHER; note = guanosine-3'-phosphate
  modified_base 9: mod_base = OTHER; note = adenosine-3'-phosphate
  modified_base 10: mod_base = OTHER; note = guanosine-3'-phosphate
  modified_base 11: mod_base = OTHER; note = cytidine-3'-phosphate
  modified_base 12: mod_base = OTHER; note = guanosine-3'-phosphate
  modified_base 13: mod_base = OTHER; note = guanosine-3'-phosphate
  modified_base 14: mod_base = OTHER; note = adenosine-3'-phosphate
  modified_base 15: mod_base = OTHER; note = uridine-3'-phosphate
  modified_base 16: mod_base = OTHER; note = uridine-3'-phosphate
  modified_base 17: mod_base = OTHER; note = adenosine-3'-phosphate
  modified_base 18: mod_base = OTHER; note = cytidine-3'-phosphate
  modified_base 19: mod_base = OTHER; note = cytidine-3'-phosphate
  misc_feature 1..19: note = RNA
  misc_feature 20..21: note = DNA
gaacctggagcggattacctt

SEQ ID NO: 176 - DNA, 21 bp, synthetic construct
  source 1..21: mol_type = other DNA
  modified_base 1: mod_base = OTHER; note = guanosine-3'-phosphate
  modified_base 2: mod_base = OTHER; note = guanosine-3'-phosphate
  modified_base 3: mod_base = OTHER; note = uridine-3'-phosphate
  modified_base 4: mod_base = OTHER; note = adenosine-3'-phosphate
  modified_base 5: mod_base = OTHER; note = adenosine-3'-phosphate
  modified_base 6: mod_base = OTHER; note = uridine-3'-phosphate
  modified_base 7: mod_base = OTHER; note = cytidine-3'-phosphate
  modified_base 8: mod_base = OTHER; note = cytidine-3'-phosphate
  modified_base 9: mod_base = OTHER; note = guanosine-3'-phosphate
  modified_base 10: mod_base = OTHER; note = cytidine-3'-phosphate
  modified_base 11: mod_base = OTHER; note = uridine-3'-phosphate
  modified_base 12: mod_base = OTHER; note = cytidine-3'-phosphate
  modified_base 13: mod_base = OTHER; note = cytidine-3'-phosphate
  modified_base 14: mod_base = OTHER; note = adenosine-3'-phosphate
  modified_base 15: mod_base = OTHER; note = guanosine-3'-phosphate
  modified_base 16: mod_base = OTHER; note = guanosine-3'-phosphate
  modified_base 17: mod_base = OTHER; note = uridine-3'-phosphate
  modified_base 18: mod_base = OTHER; note = uridine-3'-phosphate
  modified_base 19: mod_base = OTHER; note = cytidine-3'-phosphate
  misc_feature 1..19: note = RNA
  misc_feature 20..21: note = DNA
ggtaatccgctccaggttctt

SEQ ID NO: 177 - DNA, 21 bp, synthetic construct
  source 1..21: mol_type = other DNA
  modified_base 1: mod_base = OTHER; note = adenosine-3'-phosphate
  modified_base 2: mod_base = OTHER; note = adenosine-3'-phosphate
  modified_base 3: mod_base = OTHER; note = cytidine-3'-phosphate
  modified_base 4: mod_base = OTHER; note = cytidine-3'-phosphate
  modified_base 5: mod_base = OTHER; note = uridine-3'-phosphate
  modified_base 6: mod_base = OTHER; note = guanosine-3'-phosphate
  modified_base 7: mod_base = OTHER; note = guanosine-3'-phosphate
  modified_base 8: mod_base = OTHER; note = adenosine-3'-phosphate
  modified_base 9: mod_base = OTHER; note = guanosine-3'-phosphate
  modified_base 10: mod_base = OTHER; note = cytidine-3'-phosphate
  modified_base 11: mod_base = OTHER; note = guanosine-3'-phosphate
  modified_base 12: mod_base = OTHER; note = guanosine-3'-phosphate
  modified_base 13: mod_base = OTHER; note = adenosine-3'-phosphate
  modified_base 14: mod_base = OTHER; note = uridine-3'-phosphate
  modified_base 15: mod_base = OTHER; note = uridine-3'-phosphate
  modified_base 16: mod_base = OTHER; note = adenosine-3'-phosphate
  modified_base 17: mod_base = OTHER; note = cytidine-3'-phosphate
  modified_base 18: mod_base = OTHER; note = cytidine-3'-phosphate
  modified_base 19: mod_base = OTHER; note = cytidine-3'-phosphate
  misc_feature 1..19: note = RNA
  misc_feature 20..21: note = DNA
aacctggagcggattaccctt

SEQ ID NO: 178 - DNA, 21 bp, synthetic construct
  source 1..21: mol_type = other DNA
  modified_base 1: mod_base = OTHER; note = guanosine-3'-phosphate
  modified_base 2: mod_base = OTHER; note = guanosine-3'-phosphate
  modified_base 3: mod_base = OTHER; note = guanosine-3'-phosphate
  modified_base 4: mod_base = OTHER; note = uridine-3'-phosphate
  modified_base 5: mod_base = OTHER; note = adenosine-3'-phosphate
  modified_base 6: mod_base = OTHER; note = adenosine-3'-phosphate
  modified_base 7: mod_base = OTHER; note = uridine-3'-phosphate
  modified_base 8: mod_base = OTHER; note = cytidine-3'-phosphate
  modified_base 9: mod_base = OTHER; note = cytidine-3'-phosphate
  modified_base 10: mod_base = OTHER; note = guanosine-3'-phosphate
  modified_base 11: mod_base = OTHER; note = cytidine-3'-phosphate
  modified_base 12: mod_base = OTHER; note = uridine-3'-phosphate
  modified_base 13: mod_base = OTHER; note = cytidine-3'-phosphate
  modified_base 14: mod_base = OTHER; note = cytidine-3'-phosphate
  modified_base 15: mod_base = OTHER; note = adenosine-3'-phosphate
  modified_base 16: mod_base = OTHER; note = guanosine-3'-phosphate
  modified_base 17: mod_base = OTHER; note = guanosine-3'-phosphate
  modified_base 18: mod_base = OTHER; note = uridine-3'-phosphate
  modified_base 19: mod_base = OTHER; note = uridine-3'-phosphate
  misc_feature 1..19: note = RNA
  misc_feature 20..21: note = DNA
gggtaatccgctccaggtttt

SEQ ID NO: 179 - DNA, 21 bp, synthetic construct
  source 1..21: mol_type = other DNA
  modified_base 1: mod_base = OTHER; note = cytidine-3'-phosphate
  modified_base 2: mod_base = OTHER; note = cytidine-3'-phosphate
  modified_base 3: mod_base = OTHER; note = cytidine-3'-phosphate
  modified_base 4: mod_base = OTHER; note = uridine-3'-phosphate
  modified_base 5: mod_base = OTHER; note = cytidine-3'-phosphate
  modified_base 6: mod_base = OTHER; note = cytidine-3'-phosphate
  modified_base 7: mod_base = OTHER; note = adenosine-3'-phosphate
  modified_base 8: mod_base = OTHER; note = cytidine-3'-phosphate
  modified_base 9: mod_base = OTHER; note = guanosine-3'-phosphate
  modified_base 10: mod_base = OTHER; note = guanosine-3'-phosphate
  modified_base 11: mod_base = OTHER; note = uridine-3'-phosphate
  modified_base 12: mod_base = OTHER; note = adenosine-3'-phosphate
  modified_base 13: mod_base = OTHER; note = cytidine-3'-phosphate
  modified_base 14: mod_base = OTHER; note = cytidine-3'-phosphate
  modified_base 15: mod_base = OTHER; note = guanosine-3'-phosphate
  modified_base 16: mod_base = OTHER; note = guanosine-3'-phosphate
  modified_base 17: mod_base = OTHER; note = guanosine-3'-phosphate
  modified_base 18: mod_base = OTHER; note = cytidine-3'-phosphate
  modified_base 19: mod_base = OTHER; note = guanosine-3'-phosphate
  misc_feature 1..19: note = RNA
  misc_feature 20..21: note = DNA
ccctccacggtaccgggcgtt

SEQ ID NO: 180 - DNA, 21 bp, synthetic construct
  source 1..21: mol_type = other DNA
  modified_base 1: mod_base = OTHER; note = cytidine-3'-phosphate
  modified_base 2: mod_base = OTHER; note = guanosine-3'-phosphate
  modified_base 3: mod_base = OTHER; note = cytidine-3'-phosphate
  modified_base 4: mod_base = OTHER; note = cytidine-3'-phosphate
  modified_base 5: mod_base = OTHER; note = cytidine-3'-phosphate
  modified_base 6: mod_base = OTHER; note = guanosine-3'-phosphate
  modified_base 7: mod_base = OTHER; note = guanosine-3'-phosphate
  modified_base 8: mod_base = OTHER; note = uridine-3'-phosphate
  modified_base 9: mod_base = OTHER; note = adenosine-3'-phosphate
  modified_base 10: mod_base = OTHER; note = cytidine-3'-phosphate
  modified_base 11: mod_base = OTHER; note = cytidine-3'-phosphate
  modified_base 12: mod_base = OTHER; note = guanosine-3'-phosphate
  modified_base 13: mod_base = OTHER; note = uridine-3'-phosphate
  modified_base 14: mod_base = OTHER; note = guanosine-3'-phosphate
  modified_base 15: mod_base = OTHER; note = guanosine-3'-phosphate
  modified_base 16: mod_base = OTHER; note = adenosine-3'-phosphate
  modified_base 17: mod_base = OTHER; note = guanosine-3'-phosphate
  modified_base 18: mod_base = OTHER; note = guanosine-3'-phosphate
  modified_base 19: mod_base = OTHER; note = guanosine-3'-phosphate
  misc_feature 1..19: note = RNA
  misc_feature 20..21: note = DNA
cgcccggtaccgtggagggtt

SEQ ID NO: 181 - DNA, 21 bp, synthetic construct
  source 1..21: mol_type = other DNA
  modified_base 1: mod_base = OTHER; note = cytidine-3'-phosphate
  modified_base 2: mod_base = OTHER; note = adenosine-3'-phosphate
  modified_base 3: mod_base = OTHER; note = cytidine-3'-phosphate
  modified_base 4: mod_base = OTHER; note = guanosine-3'-phosphate
  modified_base 5: mod_base = OTHER; note = guanosine-3'-phosphate
  modified_base 6: mod_base = OTHER; note = uridine-3'-phosphate
  modified_base 7: mod_base = OTHER; note = adenosine-3'-phosphate
  modified_base 8: mod_base = OTHER; note = cytidine-3'-phosphate
  modified_base 9: mod_base = OTHER; note = cytidine-3'-phosphate
  modified_base 10: mod_base = OTHER; note = guanosine-3'-phosphate
  modified_base 11: mod_base = OTHER; note = guanosine-3'-phosphate
  modified_base 12: mod_base = OTHER; note = guanosine-3'-phosphate
  modified_base 13: mod_base = OTHER; note = cytidine-3'-phosphate
  modified_base 14: mod_base = OTHER; note = guanosine-3'-phosphate
  modified_base 15: mod_base = OTHER; note = guanosine-3'-phosphate
  modified_base 16: mod_base = OTHER; note = adenosine-3'-phosphate
  modified_base 17: mod_base = OTHER; note = uridine-3'-phosphate
  modified_base 18: mod_base = OTHER; note = guanosine-3'-phosphate
  modified_base 19: mod_base = OTHER; note = adenosine-3'-phosphate
  modified_base 20: mod_base = OTHER; note = 2'-deoxythymidine-3'-phosphorothioate
  misc_feature 1..19: note = RNA
  misc_feature 20..21: note = DNA
cacggtaccgggcggatgatt

SEQ ID NO: 182 - DNA, 21 bp, synthetic construct
  source 1..21: mol_type = other DNA
  modified_base 1: mod_base = OTHER; note = uridine-3'-phosphate
  modified_base 2: mod_base = OTHER; note = cytidine-3'-phosphate
  modified_base 3: mod_base = OTHER; note = adenosine-3'-phosphate
  modified_base 4: mod_base = OTHER; note = uridine-3'-phosphate
  modified_base 5: mod_base = OTHER; note = cytidine-3'-phosphate
  modified_base 6: mod_base = OTHER; note = cytidine-3'-phosphate
  modified_base 7: mod_base = OTHER; note = guanosine-3'-phosphate
  modified_base 8: mod_base = OTHER; note = cytidine-3'-phosphate
  modified_base 9: mod_base = OTHER; note = cytidine-3'-phosphate
  modified_base 10: mod_base = OTHER; note = cytidine-3'-phosphate
  modified_base 11: mod_base = OTHER; note = guanosine-3'-phosphate
  modified_base 12: mod_base = OTHER; note = guanosine-3'-phosphate
  modified_base 13: mod_base = OTHER; note = uridine-3'-phosphate
  modified_base 14: mod_base = OTHER; note = adenosine-3'-phosphate
  modified_base 15: mod_base = OTHER; note = cytidine-3'-phosphate
  modified_base 16: mod_base = OTHER; note = cytidine-3'-phosphate
  modified_base 17: mod_base = OTHER; note = guanosine-3'-phosphate
  modified_base 18: mod_base = OTHER; note = uridine-3'-phosphate
  modified_base 19: mod_base = OTHER; note = guanosine-3'-phosphate
  modified_base 20: mod_base = OTHER; note = 2'-deoxythymidine-3'-phosphorothioate
  misc_feature 1..19: note = RNA
  misc_feature 20..21: note = DNA
tcatccgcccggtaccgtgtt

SEQ ID NO: 183 - DNA, 21 bp, synthetic construct
  source 1..21: mol_type = other DNA
  modified_base 1: mod_base = OTHER; note = 2'-O-methylcytidine-3'-phosphate
  modified_base 2: mod_base = OTHER; note = adenosine-3'-phosphate
  modified_base 3: mod_base = OTHER; note = 2'-O-methylcytidine-3'-phosphate
  modified_base 4: mod_base = OTHER; note = guanosine-3'-phosphate
  modified_base 5: mod_base = OTHER; note = guanosine-3'-phosphate
  modified_base 6: mod_base = OTHER; note = 2'-O-methyluridine-3'-phosphate
  modified_base 7: mod_base = OTHER; note = adenosine-3'-phosphate
  modified_base 8: mod_base = OTHER; note = 2'-O-methylcytidine-3'-phosphate
  modified_base 9: mod_base = OTHER; note = 2'-O-methylcytidine-3'-phosphate
  modified_base 10: mod_base = OTHER; note = guanosine-3'-phosphate
  modified_base 11: mod_base = OTHER; note = guanosine-3'-phosphate
  modified_base 12: mod_base = OTHER; note = guanosine-3'-phosphate
  modified_base 13: mod_base = OTHER; note = 2'-O-methylcytidine-3'-phosphate
  modified_base 14: mod_base = OTHER; note = guanosine-3'-phosphate
  modified_base 15: mod_base = OTHER; note = guanosine-3'-phosphate
  modified_base 16: mod_base = OTHER; note = adenosine-3'-phosphate
  modified_base 17: mod_base = OTHER; note = 2'-O-methyluridine-3'-phosphate
  modified_base 18: mod_base = OTHER; note = guanosine-3'-phosphate
  modified_base 19: mod_base = OTHER; note = adenosine-3'-phosphate
  modified_base 20: mod_base = OTHER; note = 2'-deoxythymidine-3'-phosphorothioate
  misc_feature 1..19: note = RNA
  misc_feature 20..21: note = DNA
cacggtaccgggcggatgatt

SEQ ID NO: 184 - DNA, 21 bp, synthetic construct
  source 1..21: mol_type = other DNA
  modified_base 1: mod_base = OTHER; note = uridine-3'-phosphate
  modified_base 2: mod_base = OTHER; note = 2'-O-methylcytidine-3'-phosphate
  modified_base 3: mod_base = OTHER; note = adenosine-3'-phosphate
  modified_base 4: mod_base = OTHER; note = uridine-3'-phosphate
  modified_base 5: mod_base = OTHER; note = cytidine-3'-phosphate
  modified_base 6: mod_base = OTHER; note = cytidine-3'-phosphate
  modified_base 7: mod_base = OTHER; note = guanosine-3'-phosphate
  modified_base 8: mod_base = OTHER; note = cytidine-3'-phosphate
  modified_base 9: mod_base = OTHER; note = cytidine-3'-phosphate
  modified_base 10: mod_base = OTHER; note = cytidine-3'-phosphate
  modified_base 11: mod_base = OTHER; note = guanosine-3'-phosphate
  modified_base 12: mod_base = OTHER; note = guanosine-3'-phosphate
  modified_base 13: mod_base = OTHER; note = 2'-O-methyluridine-3'-phosphate
  modified_base 14: mod_base = OTHER; note = adenosine-3'-phosphate
  modified_base 15: mod_base = OTHER; note = cytidine-3'-phosphate
  modified_base 16: mod_base = OTHER; note = cytidine-3'-phosphate
  modified_base 17: mod_base = OTHER; note = guanosine-3'-phosphate
  modified_base 18: mod_base = OTHER; note = uridine-3'-phosphate
  modified_base 19: mod_base = OTHER; note = guanosine-3'-phosphate
  modified_base 20: mod_base = OTHER; note = 2'-deoxythymidine-3'-phosphorothioate
  misc_feature 1..19: note = RNA
  misc_feature 20..21: note = DNA
tcatccgcccggtaccgtgtt

SEQ ID NO: 185 - DNA, 21 bp, synthetic construct
  source 1..21: mol_type = other DNA
  modified_base 1: mod_base = OTHER; note = adenosine-3'-phosphate
  modified_base 2: mod_base = OTHER; note = cytidine-3'-phosphate
  modified_base 3: mod_base = OTHER; note = guanosine-3'-phosphate
  modified_base 4: mod_base = OTHER; note = guanosine-3'-phosphate
  modified_base 5: mod_base = OTHER; note = uridine-3'-phosphate
  modified_base 6: mod_base = OTHER; note = adenosine-3'-phosphate
  modified_base 7: mod_base = OTHER; note = cytidine-3'-phosphate
  modified_base 8: mod_base = OTHER; note = cytidine-3'-phosphate
  modified_base 9: mod_base = OTHER; note = guanosine-3'-phosphate
  modified_base 10: mod_base = OTHER; note = guanosine-3'-phosphate
  modified_base 11: mod_base = OTHER; note = guanosine-3'-phosphate
  modified_base 12: mod_base = OTHER; note = cytidine-3'-phosphate
  modified_base 13: mod_base = OTHER; note = guanosine-3'-phosphate
  modified_base 14: mod_base = OTHER; note = guanosine-3'-phosphate
  modified_base 15: mod_base = OTHER; note = adenosine-3'-phosphate
  modified_base 16: mod_base = OTHER; note = uridine-3'-phosphate
  modified_base 17: mod_base = OTHER; note = guanosine-3'-phosphate
  modified_base 18: mod_base = OTHER; note = adenosine-3'-phosphate
  modified_base 19: mod_base = OTHER; note = adenosine-3'-phosphate
  modified_base 20: mod_base = OTHER; note = 2'-deoxythymidine-3'-phosphorothioate
  misc_feature 1..19: note = RNA
  misc_feature 20..21: note = DNA
acggtaccgggcggatgaatt

SEQ ID NO: 186 - DNA, 21 bp, synthetic construct
  source 1..21: mol_type = other DNA
  modified_base 1: mod_base = OTHER; note = uridine-3'-phosphate
  modified_base 2: mod_base = OTHER; note = uridine-3'-phosphate
  modified_base 3: mod_base = OTHER; note = cytidine-3'-phosphate
  modified_base 4: mod_base = OTHER; note = adenosine-3'-phosphate
  modified_base 5: mod_base = OTHER; note = uridine-3'-phosphate
  modified_base 6: mod_base = OTHER; note = cytidine-3'-phosphate
  modified_base 7: mod_base = OTHER; note = cytidine-3'-phosphate
  modified_base 8: mod_base = OTHER; note = guanosine-3'-phosphate
  modified_base 9: mod_base = OTHER; note = cytidine-3'-phosphate
  modified_base 10: mod_base = OTHER; note = cytidine-3'-phosphate
  modified_base 11: mod_base = OTHER; note = cytidine-3'-phosphate
  modified_base 12: mod_base = OTHER; note = guanosine-3'-phosphate
  modified_base 13: mod_base = OTHER; note = guanosine-3'-phosphate
  modified_base 14: mod_base = OTHER; note = uridine-3'-phosphate
  modified_base 15: mod_base = OTHER; note = adenosine-3'-phosphate
  modified_base 16: mod_base = OTHER; note = cytidine-3'-phosphate
  modified_base 17: mod_base = OTHER; note = cytidine-3'-phosphate
  modified_base 18: mod_base = OTHER; note = guanosine-3'-phosphate
  modified_base 19: mod_base = OTHER; note = uridine-3'-phosphate
  modified_base 20: mod_base = OTHER; note = 2'-deoxythymidine-3'-phosphorothioate
  misc_feature 1..19: note = RNA
  misc_feature 20..21: note = DNA
ttcatccgcccggtaccgttt

SEQ ID NO: 187 - DNA, 21 bp, synthetic construct
  source 1..21: mol_type = other DNA
  modified_base 1: mod_base = OTHER; note = adenosine-3'-phosphate
  modified_base 2: mod_base = OTHER; note = 2'-O-methylcytidine-3'-phosphate
  modified_base 3: mod_base = OTHER; note = guanosine-3'-phosphate
  modified_base 4: mod_base = OTHER; note = guanosine-3'-phosphate
  modified_base 5: mod_base = OTHER; note = 2'-O-methyluridine-3'-phosphate
  modified_base 6: mod_base = OTHER; note = adenosine-3'-phosphate
  modified_base 7: mod_base = OTHER; note = 2'-O-methylcytidine-3'-phosphate
  modified_base 8: mod_base = OTHER; note = 2'-O-methylcytidine-3'-phosphate
  modified_base 9: mod_base = OTHER; note = guanosine-3'-phosphate
  modified_base 10: mod_base = OTHER; note = guanosine-3'-phosphate
  modified_base 11: mod_base = OTHER; note = guanosine-3'-phosphate
  modified_base 12: mod_base = OTHER; note = 2'-O-methylcytidine-3'-phosphate
  modified_base 13: mod_base = OTHER; note = guanosine-3'-phosphate
  modified_base 14: mod_base = OTHER; note = guanosine-3'-phosphate
  modified_base 15: mod_base = OTHER; note = adenosine-3'-phosphate
  modified_base 16: mod_base = OTHER; note = 2'-O-methyluridine-3'-phosphate
  modified_base 17: mod_base = OTHER; note = guanosine-3'-phosphate
  modified_base 18: mod_base = OTHER; note = adenosine-3'-phosphate
  modified_base 19: mod_base = OTHER; note = adenosine-3'-phosphate
  modified_base 20: mod_base = OTHER; note = 2'-deoxythymidine-3'-phosphorothioate
  misc_feature 1..19: note = RNA
  misc_feature 20..21: note = DNA
acggtaccgggcggatgaatt

SEQ ID NO: 188 - DNA, 21 bp, synthetic construct
  source 1..21: mol_type = other DNA
  modified_base 1: mod_base = OTHER; note = uridine-3'-phosphate
  modified_base 2: mod_base = OTHER; note = uridine-3'-phosphate
  modified_base 3: mod_base = OTHER; note = 2'-O-methylcytidine-3'-phosphate
  modified_base 4: mod_base = OTHER; note = adenosine-3'-phosphate
  modified_base 5: mod_base = OTHER; note = uridine-3'-phosphate
  modified_base 6: mod_base = OTHER; note = cytidine-3'-phosphate
  modified_base 7: mod_base = OTHER; note = cytidine-3'-phosphate
  modified_base 8: mod_base = OTHER; note = guanosine-3'-phosphate
  modified_base 9: mod_base = OTHER; note = cytidine-3'-phosphate
  modified_base 10: mod_base = OTHER; note = cytidine-3'-phosphate
  modified_base 11: mod_base = OTHER; note = cytidine-3'-phosphate
  modified_base 12: mod_base = OTHER; note = guanosine-3'-phosphate
  modified_base 13: mod_base = OTHER; note = guanosine-3'-phosphate
  modified_base 14: mod_base = OTHER; note = 2'-O-methyluridine-3'-phosphate
  modified_base 15: mod_base = OTHER; note = adenosine-3'-phosphate
  modified_base 16: mod_base = OTHER; note = cytidine-3'-phosphate
  modified_base 17: mod_base = OTHER; note = cytidine-3'-phosphate
  modified_base 18: mod_base = OTHER; note = guanosine-3'-phosphate
  modified_base 19: mod_base = OTHER; note = uridine-3'-phosphate
  modified_base 20: mod_base = OTHER; note = 2'-deoxythymidine-3'-phosphorothioate
  misc_feature 1..19: note = RNA
  misc_feature 20..21: note = DNA
ttcatccgcccggtaccgttt

SEQ ID NO: 189 - DNA, 21 bp, synthetic construct
  source 1..21: mol_type = other DNA
  modified_base 1: mod_base = OTHER; note = cytidine-3'-phosphate
  modified_base 2: mod_base = OTHER; note = guanosine-3'-phosphate
  modified_base 3: mod_base = OTHER; note = guanosine-3'-phosphate
  modified_base 4: mod_base = OTHER; note = uridine-3'-phosphate
  modified_base 5: mod_base = OTHER; note = adenosine-3'-phosphate
  modified_base 6: mod_base = OTHER; note = cytidine-3'-phosphate
  modified_base 7: mod_base = OTHER; note = cytidine-3'-phosphate
  modified_base 8: mod_base = OTHER; note = guanosine-3'-phosphate
  modified_base 9: mod_base = OTHER; note = guanosine-3'-phosphate
  modified_base 10: mod_base = OTHER; note = guanosine-3'-phosphate
  modified_base 11: mod_base = OTHER; note = cytidine-3'-phosphate
  modified_base 12: mod_base = OTHER; note = guanosine-3'-phosphate
  modified_base 13: mod_base = OTHER; note = guanosine-3'-phosphate
  modified_base 14: mod_base = OTHER; note = adenosine-3'-phosphate
  modified_base 15: mod_base = OTHER; note = uridine-3'-phosphate
  modified_base 16: mod_base = OTHER; note = guanosine-3'-phosphate
  modified_base 17: mod_base = OTHER; note = adenosine-3'-phosphate
  modified_base 18: mod_base = OTHER; note = adenosine-3'-phosphate
  modified_base 19: mod_base = OTHER; note = uridine-3'-phosphate
  modified_base 20: mod_base = OTHER; note = 2'-deoxythymidine-3'-phosphorothioate
  misc_feature 1..19: note = RNA
  misc_feature 20..21: note = DNA
cggtaccgggcggatgaattt

SEQ ID NO: 190 - DNA, 21 bp, synthetic construct
  source 1..21: mol_type = other DNA
  modified_base 1: mod_base = OTHER; note = adenosine-3'-phosphate
  modified_base 2: mod_base = OTHER; note = uridine-3'-phosphate
  modified_base 3: mod_base = OTHER; note = uridine-3'-phosphate
  modified_base 4: mod_base = OTHER; note = cytidine-3'-phosphate
  modified_base 5: mod_base = OTHER; note = adenosine-3'-phosphate
  modified_base 6: mod_base = OTHER; note = uridine-3'-phosphate
  modified_base 7: mod_base = OTHER; note = cytidine-3'-phosphate
  modified_base 8: mod_base = OTHER; note = cytidine-3'-phosphate
  modified_base 9: mod_base = OTHER; note = guanosine-3'-phosphate
  modified_base 10: mod_base = OTHER; note = cytidine-3'-phosphate
  modified_base 11: mod_base = OTHER; note = cytidine-3'-phosphate
  modified_base 12: mod_base = OTHER; note = cytidine-3'-phosphate
  modified_base 13: mod_base = OTHER; note = guanosine-3'-phosphate
  modified_base 14: mod_base = OTHER; note = guanosine-3'-phosphate
  modified_base 15: mod_base = OTHER; note = uridine-3'-phosphate
  modified_base 16: mod_base = OTHER; note = adenosine-3'-phosphate
  modified_base 17: mod_base = OTHER; note = cytidine-3'-phosphate
  modified_base 18: mod_base = OTHER; note = cytidine-3'-phosphate
  modified_base 19: mod_base = OTHER; note = guanosine-3'-phosphate
  modified_base 20: mod_base = OTHER; note = 2'-deoxythymidine-3'-phosphorothioate
  misc_feature 1..19: note = RNA
  misc_feature 20..21: note = DNA
attcatccgcccggtaccgtt

SEQ ID NO: 191 - DNA, 21 bp, synthetic construct
  source 1..21: mol_type = other DNA
  modified_base 1: mod_base = OTHER; note = 2'-O-methylcytidine-3'-phosphate
  modified_base 2: mod_base = OTHER; note = guanosine-3'-phosphate
  modified_base 3: mod_base = OTHER; note = guanosine-3'-phosphate
  modified_base 4: mod_base = OTHER; note = 2'-O-methyluridine-3'-phosphate
  modified_base 5: mod_base = OTHER; note = adenosine-3'-phosphate
  modified_base 6: mod_base = OTHER; note = 2'-O-methylcytidine-3'-phosphate
  modified_base 7: mod_base = OTHER; note = 2'-O-methylcytidine-3'-phosphate
  modified_base 8: mod_base = OTHER; note = guanosine-3'-phosphate
  modified_base 9: mod_base = OTHER; note = guanosine-3'-phosphate
  modified_base 10: mod_base = OTHER; note = guanosine-3'-phosphate
  modified_base 11: mod_base = OTHER; note = 2'-O-methylcytidine-3'-phosphate
  modified_base 12: mod_base = OTHER; note = guanosine-3'-phosphate
  modified_base 13: mod_base = OTHER; note = guanosine-3'-phosphate
  modified_base 14: mod_base = OTHER; note = adenosine-3'-phosphate
  modified_base 15: mod_base = OTHER; note = 2'-O-methyluridine-3'-phosphate
  modified_base 16: mod_base = OTHER; note = guanosine-3'-phosphate
  modified_base 17: mod_base = OTHER; note = adenosine-3'-phosphate
  modified_base 18: mod_base = OTHER; note = adenosine-3'-phosphate
  modified_base 19: mod_base = OTHER; note = 2'-O-methyluridine-3'-phosphate
  modified_base 20: mod_base = OTHER; note = 2'-deoxythymidine-3'-phosphorothioate
  misc_feature 1..19: note = RNA
  misc_feature 20..21: note = DNA
cggtaccgggcggatgaattt

SEQ ID NO: 192 - DNA, 21 bp, synthetic construct
  source 1..21: mol_type = other DNA
  modified_base 1: mod_base = OTHER; note = adenosine-3'-phosphate
  modified_base 2: mod_base = OTHER; note = uridine-3'-phosphate
  modified_base 3: mod_base = OTHER; note = uridine-3'-phosphate
  modified_base 4: mod_base = OTHER; note = 2'-O-methylcytidine-3'-phosphate
  modified_base 5: mod_base = OTHER; note = adenosine-3'-phosphate
  modified_base 6: mod_base = OTHER; note = uridine-3'-phosphate
  modified_base 7: mod_base = OTHER; note = cytidine-3'-phosphate
  modified_base 8: mod_base = OTHER; note = cytidine-3'-phosphate
  modified_base 9: mod_base = OTHER; note = guanosine-3'-phosphate
  modified_base 10: mod_base = OTHER; note = cytidine-3'-phosphate
  modified_base 11: mod_base = OTHER; note = cytidine-3'-phosphate
  modified_base 12: mod_base = OTHER; note = cytidine-3'-phosphate
  modified_base 13: mod_base = OTHER; note = guanosine-3'-phosphate
  modified_base 14: mod_base = OTHER; note = guanosine-3'-phosphate
  modified_base 15: mod_base = OTHER; note = 2'-O-methyluridine-3'-phosphate
  modified_base 16: mod_base = OTHER; note = adenosine-3'-phosphate
  modified_base 17: mod_base = OTHER; note = cytidine-3'-phosphate
  modified_base 18: mod_base = OTHER; note = cytidine-3'-phosphate
  modified_base 19: mod_base = OTHER; note = guanosine-3'-phosphate
  modified_base 20: mod_base = OTHER; note = 2'-deoxythymidine-3'-phosphorothioate
  misc_feature 1..19: note = RNA
  misc_feature 20..21: note = DNA
attcatccgcccggtaccgtt

SEQ ID NO: 193 - DNA, 21 bp, synthetic construct
  source 1..21: mol_type = other DNA
  modified_base 1: mod_base = OTHER; note = guanosine-3'-phosphate
  modified_base 2: mod_base = OTHER; note = guanosine-3'-phosphate
  modified_base 3: mod_base = OTHER; note = uridine-3'-phosphate
  modified_base 4: mod_base = OTHER; note = adenosine-3'-phosphate
  modified_base 5: mod_base = OTHER; note = cytidine-3'-phosphate
  modified_base 6: mod_base = OTHER; note = cytidine-3'-phosphate
  modified_base 7: mod_base = OTHER; note = guanosine-3'-phosphate
  modified_base 8: mod_base = OTHER; note = guanosine-3'-phosphate
  modified_base 9: mod_base = OTHER; note = guanosine-3'-phosphate
  modified_base 10: mod_base = OTHER; note = cytidine-3'-phosphate
  modified_base 11: mod_base = OTHER; note = guanosine-3'-phosphate
  modified_base 12: mod_base = OTHER; note = guanosine-3'-phosphate
  modified_base 13: mod_base = OTHER; note = adenosine-3'-phosphate
  modified_base 14: mod_base = OTHER; note = uridine-3'-phosphate
  modified_base 15: mod_base = OTHER; note = guanosine-3'-phosphate
  modified_base 16: mod_base = OTHER; note = adenosine-3'-phosphate
  modified_base 17: mod_base = OTHER; note = adenosine-3'-phosphate
  modified_base 18: mod_base = OTHER; note = uridine-3'-phosphate
  modified_base 19: mod_base = OTHER; note = adenosine-3'-phosphate
  modified_base 20: mod_base = OTHER; note = 2'-deoxythymidine-3'-phosphorothioate
  misc_feature 1..19: note = RNA
  misc_feature 20..21: note = DNA
ggtaccgggcggatgaatatt

SEQ ID NO: 194 - DNA, 21 bp, synthetic construct
  source 1..21: mol_type = other DNA
  modified_base 1: mod_base = OTHER; note = uridine-3'-phosphate
  modified_base 2: mod_base = OTHER; note = adenosine-3'-phosphate
  modified_base 3: mod_base = OTHER; note = uridine-3'-phosphate
  modified_base 4: mod_base = OTHER; note = uridine-3'-phosphate
  modified_base 5: mod_base = OTHER; note = cytidine-3'-phosphate
  modified_base 6: mod_base = OTHER; note = adenosine-3'-phosphate
  modified_base 7: mod_base = OTHER; note = uridine-3'-phosphate
  modified_base 8: mod_base = OTHER; note = cytidine-3'-phosphate
  modified_base 9: mod_base = OTHER; note = cytidine-3'-phosphate
  modified_base 10: mod_base = OTHER; note = guanosine-3'-phosphate
  modified_base 11: mod_base = OTHER; note = cytidine-3'-phosphate
  modified_base 12: mod_base = OTHER; note = cytidine-3'-phosphate
  modified_base 13: mod_base = OTHER; note = cytidine-3'-phosphate
  modified_base 14: mod_base = OTHER; note = guanosine-3'-phosphate
  modified_base 15: mod_base = OTHER; note = guanosine-3'-phosphate
  modified_base 16: mod_base = OTHER; note = uridine-3'-phosphate
  modified_base 17: mod_base = OTHER; note = adenosine-3'-phosphate
  modified_base 18: mod_base = OTHER; note = cytidine-3'-phosphate
  modified_base 19: mod_base = OTHER; note = cytidine-3'-phosphate
  modified_base 20: mod_base = OTHER; note = 2'-deoxythymidine-3'-phosphorothioate
  misc_feature 1..19: note = RNA
  misc_feature 20..21: note = DNA
tattcatccgcccggtacctt

SEQ ID NO: 195 - DNA, 21 bp, synthetic construct
  source 1..21: mol_type = other DNA
  modified_base 1: mod_base = OTHER; note = guanosine-3'-phosphate
  modified_base 2: mod_base = OTHER; note = guanosine-3'-phosphate
  modified_base 3: mod_base = OTHER; note = 2'-O-methyluridine-3'-phosphate
  modified_base 4: mod_base = OTHER; note = adenosine-3'-phosphate
  modified_base 5: mod_base = OTHER; note = 2'-O-methylcytidine-3'-phosphate
  modified_base 6: mod_base = OTHER; note = 2'-O-methylcytidine-3'-phosphate
  modified_base 7: mod_base = OTHER; note = guanosine-3'-phosphate
  modified_base 8: mod_base = OTHER; note = guanosine-3'-phosphate
  modified_base 9: mod_base = OTHER; note = guanosine-3'-phosphate
  modified_base 10: mod_base = OTHER; note = 2'-O-methylcytidine-3'-phosphate
  modified_base 11: mod_base = OTHER; note = guanosine-3'-phosphate
  modified_base 12: mod_base = OTHER; note = guanosine-3'-phosphate
  modified_base 13: mod_base = OTHER; note = adenosine-3'-phosphate
  modified_base 14: mod_base = OTHER; note = 2'-O-methyluridine-3'-phosphate
  modified_base 15: mod_base = OTHER; note = guanosine-3'-phosphate
  modified_base 16: mod_base = OTHER; note = adenosine-3'-phosphate
  modified_base 17: mod_base = OTHER; note = adenosine-3'-phosphate
  modified_base 18: mod_base = OTHER; note = 2'-O-methyluridine-3'-phosphate
  modified_base 19: mod_base = OTHER; note = adenosine-3'-phosphate
  modified_base 20: mod_base = OTHER; note = 2'-deoxythymidine-3'-phosphorothioate
  misc_feature 1..19: note = RNA
  misc_feature 20..21: note = DNA
ggtaccgggcggatgaatatt

SEQ ID NO: 196 - DNA, 21 bp, synthetic construct
  source 1..21: mol_type = other DNA
  modified_base 1: mod_base = OTHER; note = 2'-O-methyluridine-3'-phosphate
  modified_base 2: mod_base = OTHER; note = adenosine-3'-phosphate
  modified_base 3: mod_base = OTHER; note = uridine-3'-phosphate
  modified_base 4: mod_base = OTHER; note = uridine-3'-phosphate
  modified_base 5: mod_base = OTHER; note = 2'-O-methylcytidine-3'-phosphate
  modified_base 6: mod_base = OTHER; note = adenosine-3'-phosphate
  modified_base 7: mod_base = OTHER; note = uridine-3'-phosphate
  modified_base 8: mod_base = OTHER; note = cytidine-3'-phosphate
  modified_base 9: mod_base = OTHER; note = cytidine-3'-phosphate
  modified_base 10: mod_base = OTHER; note = guanosine-3'-phosphate
  modified_base 11: mod_base = OTHER; note = cytidine-3'-phosphate
  modified_base 12: mod_base = OTHER; note = cytidine-3'-phosphate
  modified_base 13: mod_base = OTHER; note = cytidine-3'-phosphate
  modified_base 14: mod_base = OTHER; note = guanosine-3'-phosphate
  modified_base 15: mod_base = OTHER; note = guanosine-3'-phosphate
  modified_base 16: mod_base = OTHER; note = 2'-O-methyluridine-3'-phosphate
  modified_base 17: mod_base = OTHER; note = adenosine-3'-phosphate
  modified_base 18: mod_base = OTHER; note = cytidine-3'-phosphate
  modified_base 19: mod_base = OTHER; note = cytidine-3'-phosphate
  modified_base 20: mod_base = OTHER; note = 2'-deoxythymidine-3'-phosphorothioate
  misc_feature 1..19: note = RNA
  misc_feature 20..21: note = DNA
tattcatccgcccggtacctt

SEQ ID NO: 197 - DNA, 21 bp, synthetic construct
  source 1..21: mol_type = other DNA
  modified_base 1: mod_base = OTHER; note = guanosine-3'-phosphate
  modified_base 2: mod_base = OTHER; note = uridine-3'-phosphate
  modified_base 3: mod_base = OTHER; note = adenosine-3'-phosphate
  modified_base 4: mod_base = OTHER; note = cytidine-3'-phosphate
  modified_base 5: mod_base = OTHER; note = cytidine-3'-phosphate
  modified_base 6: mod_base = OTHER; note = guanosine-3'-phosphate
  modified_base 7: mod_base = OTHER; note = guanosine-3'-phosphate
  modified_base 8: mod_base = OTHER; note = guanosine-3'-phosphate
  modified_base 9: mod_base = OTHER; note = cytidine-3'-phosphate
  modified_base 10: mod_base = OTHER; note = guanosine-3'-phosphate
  modified_base 11: mod_base = OTHER; note = guanosine-3'-phosphate
  modified_base 12: mod_base = OTHER; note = adenosine-3'-phosphate
  modified_base 13: mod_base = OTHER; note = uridine-3'-phosphate
  modified_base 14: mod_base = OTHER; note = guanosine-3'-phosphate
  modified_base 15: mod_base = OTHER; note = adenosine-3'-phosphate
  modified_base 16: mod_base = OTHER; note = adenosine-3'-phosphate
  modified_base 17: mod_base = OTHER; note = uridine-3'-phosphate
  modified_base 18: mod_base = OTHER; note = adenosine-3'-phosphate
  modified_base 19: mod_base = OTHER; note = cytidine-3'-phosphate
  modified_base 20: mod_base = OTHER; note = 2'-deoxythymidine-3'-phosphorothioate
  misc_feature 1..19: note = RNA
  misc_feature 20..21: note = DNA
gtaccgggcggatgaatactt

SEQ ID NO: 198 - DNA, 21 bp, synthetic construct
  source 1..21: mol_type = other DNA
  modified_base 1: mod_base = OTHER; note = guanosine-3'-phosphate
  modified_base 2: mod_base = OTHER; note = uridine-3'-phosphate
  modified_base 3: mod_base = OTHER; note = adenosine-3'-phosphate
  modified_base 4: mod_base = OTHER; note = uridine-3'-phosphate
  modified_base 5: mod_base = OTHER; note = uridine-3'-phosphate
  modified_base 6: mod_base = OTHER; note = cytidine-3'-phosphate
  modified_base 7: mod_base = OTHER; note = adenosine-3'-phosphate
  modified_base 8: mod_base = OTHER; note = uridine-3'-phosphate
  modified_base 9: mod_base = OTHER; note = cytidine-3'-phosphate
  modified_base 10: mod_base = OTHER; note = cytidine-3'-phosphate
  modified_base 11: mod_base = OTHER; note = guanosine-3'-phosphate
  modified_base 12: mod_base = OTHER; note = cytidine-3'-phosphate
  modified_base 13: mod_base = OTHER; note = cytidine-3'-phosphate
  modified_base 14: mod_base = OTHER; note = cytidine-3'-phosphate
  modified_base 15: mod_base = OTHER; note = guanosine-3'-phosphate
  modified_base 16: mod_base = OTHER; note = guanosine-3'-phosphate
  modified_base 17: mod_base = OTHER; note = uridine-3'-phosphate
  modified_base 18: mod_base = OTHER; note = adenosine-3'-phosphate
  modified_base 19: mod_base = OTHER; note = cytidine-3'-phosphate
  modified_base 20: mod_base = OTHER; note = 2'-deoxythymidine-3'-phosphorothioate
  misc_feature 1..19: note = RNA
  misc_feature 20..21: note = DNA
gtattcatccgcccggtactt

SEQ ID NO: 199 - DNA, 21 bp, synthetic construct
  source 1..21: mol_type = other DNA
  modified_base 1: mod_base = OTHER; note = guanosine-3'-phosphate
  modified_base 2: mod_base = OTHER; note = 2'-O-methyluridine-3'-phosphate
  modified_base 3: mod_base = OTHER; note = adenosine-3'-phosphate
  modified_base 4: mod_base = OTHER; note = 2'-O-methylcytidine-3'-phosphate
  modified_base 5: mod_base = OTHER; note = 2'-O-methylcytidine-3'-phosphate
  modified_base 6: mod_base = OTHER; note = guanosine-3'-phosphate
  modified_base 7: mod_base = OTHER; note = guanosine-3'-phosphate
  modified_base 8: mod_base = OTHER; note = guanosine-3'-phosphate
  modified_base 9: mod_base = OTHER; note = 2'-O-methylcytidine-3'-phosphate
  modified_base 10: mod_base = OTHER; note = guanosine-3'-phosphate
  modified_base 11: mod_base = OTHER; note = guanosine-3'-phosphate
  modified_base 12: mod_base = OTHER; note = adenosine-3'-phosphate
  modified_base 13: mod_base = OTHER; note = 2'-O-methyluridine-3'-phosphate
  modified_base 14: mod_base = OTHER; note = guanosine-3'-phosphate
  modified_base 15: mod_base = OTHER; note = adenosine-3'-phosphate
  modified_base 16: mod_base = OTHER; note = adenosine-3'-phosphate
  modified_base 17: mod_base = OTHER; note = 2'-O-methyluridine-3'-phosphate
  modified_base 18: mod_base = OTHER; note = adenosine-3'-phosphate
  modified_base 19: mod_base = OTHER; note = 2'-O-methylcytidine-3'-phosphate
  modified_base 20: mod_base = OTHER; note = 2'-deoxythymidine-3'-phosphorothioate
  misc_feature 1..19: note = RNA
  misc_feature 20..21: note = DNA
gtaccgggcggatgaatactt

SEQ ID NO: 200 - DNA, 21 bp, synthetic construct
  source 1..21: mol_type = other DNA
  modified_base 1: mod_base = OTHER; note = guanosine-3'-phosphate
  modified_base 2: mod_base = OTHER; note = 2'-O-methyluridine-3'-phosphate
  modified_base 3: mod_base = OTHER; note = adenosine-3'-phosphate
  modified_base 4: mod_base = OTHER; note = uridine-3'-phosphate
  modified_base 5: mod_base = OTHER; note = uridine-3'-phosphate
  modified_base 6: mod_base = OTHER; note = 2'-O-methylcytidine-3'-phosphate
  modified_base 7: mod_base = OTHER; note = adenosine-3'-phosphate
  modified_base 8: mod_base = OTHER; note = uridine-3'-phosphate
  modified_base 9: mod_base = OTHER; note = cytidine-3'-phosphate
  modified_base 10: mod_base = OTHER; note = cytidine-3'-phosphate
  modified_base 11: mod_base = OTHER; note = guanosine-3'-phosphate
  modified_base 12: mod_base = OTHER; note = cytidine-3'-phosphate
  modified_base 13: mod_base = OTHER; note = cytidine-3'-phosphate
  modified_base 14: mod_base = OTHER; note = cytidine-3'-phosphate
  modified_base 15: mod_base = OTHER; note = guanosine-3'-phosphate
  modified_base 16: mod_base = OTHER; note = guanosine-3'-phosphate
  modified_base 17: mod_base = OTHER; note = 2'-O-methyluridine-3'-phosphate
  modified_base 18: mod_base = OTHER; note = adenosine-3'-phosphate
  modified_base 19: mod_base = OTHER; note = cytidine-3'-phosphate
  modified_base 20: mod_base = OTHER; note = 2'-deoxythymidine-3'-phosphorothioate
  misc_feature 1..19: note = RNA
  misc_feature 20..21: note = DNA
gtattcatccgcccggtactt

SEQ ID NO: 201 - DNA, 21 bp, synthetic construct
  source 1..21: mol_type = other DNA
  modified_base 1: mod_base = OTHER; note = adenosine-3'-phosphate
  modified_base 2: mod_base = OTHER; note = cytidine-3'-phosphate
  modified_base 3: mod_base = OTHER; note = cytidine-3'-phosphate
  modified_base 4: mod_base = OTHER; note = guanosine-3'-phosphate
  modified_base 5: mod_base = OTHER; note = guanosine-3'-phosphate
  modified_base 6: mod_base = OTHER; note = guanosine-3'-phosphate
  modified_base 7: mod_base = OTHER; note = cytidine-3'-phosphate
  modified_base 8: mod_base = OTHER; note = guanosine-3'-phosphate
  modified_base 9: mod_base = OTHER; note = guanosine-3'-phosphate
  modified_base 10: mod_base = OTHER; note = adenosine-3'-phosphate
  modified_base 11: mod_base = OTHER; note = uridine-3'-phosphate
  modified_base 12: mod_base = OTHER; note = guanosine-3'-phosphate
  modified_base 13: mod_base = OTHER; note = adenosine-3'-phosphate
  modified_base 14: mod_base = OTHER; note = adenosine-3'-phosphate
  modified_base 15: mod_base = OTHER; note = uridine-3'-phosphate
  modified_base 16: mod_base = OTHER; note = adenosine-3'-phosphate
  modified_base 17: mod_base = OTHER; note = cytidine-3'-phosphate
  modified_base 18: mod_base = OTHER; note = cytidine-3'-phosphate
  modified_base 19: mod_base = OTHER; note = adenosine-3'-phosphate
  modified_base 20: mod_base = OTHER; note = 2'-deoxythymidine-3'-phosphorothioate
  misc_feature 1..19: note = RNA
  misc_feature 20..21: note = DNA
accgggcggatgaataccatt

SEQ ID NO: 202 - DNA, 21 bp, synthetic construct
  source 1..21: mol_type = other DNA
  modified_base 1: mod_base = OTHER; note = uridine-3'-phosphate
  modified_base 2: mod_base = OTHER; note = guanosine-3'-phosphate
  modified_base 3: mod_base = OTHER; note = guanosine-3'-phosphate
  modified_base 4: mod_base = OTHER; note = uridine-3'-phosphate
  modified_base 5: mod_base = OTHER; note = adenosine-3'-phosphate
  modified_base 6: mod_base = OTHER; note = uridine-3'-phosphate
  modified_base 7: mod_base = OTHER; note = uridine-3'-phosphate
  modified_base 8: mod_base = OTHER; note = cytidine-3'-phosphate
  modified_base 9: mod_base = OTHER; note = adenosine-3'-phosphate
  modified_base 10: mod_base = OTHER; note = uridine-3'-phosphate
  modified_base 11: mod_base = OTHER; note = cytidine-3'-phosphate
  modified_base 12: mod_base = OTHER; note = cytidine-3'-phosphate
  modified_base 13: mod_base = OTHER; note = guanosine-3'-phosphate
  modified_base 14: mod_base = OTHER; note = cytidine-3'-phosphate
  modified_base 15: mod_base = OTHER; note = cytidine-3'-phosphate
  modified_base 16: mod_base = OTHER; note = cytidine-3'-phosphate
  modified_base 17: mod_base = OTHER; note = guanosine-3'-phosphate
  modified_base 18: mod_base = OTHER; note = guanosine-3'-phosphate
  modified_base 19: mod_base = OTHER; note = uridine-3'-phosphate
  modified_base 20: mod_base = OTHER; note = 2'-deoxythymidine-3'-phosphorothioate
  misc_feature 1..19: note = RNA
  misc_feature 20..21: note = DNA
tggtattcatccgcccggttt

SEQ ID NO: 203 - DNA, 21 bp, synthetic construct
  source 1..21: mol_type = other DNA
  modified_base 1: mod_base = OTHER; note = adenosine-3'-phosphate
  modified_base 2: mod_base = OTHER; note = 2'-O-methylcytidine-3'-phosphate
  modified_base 3: mod_base = OTHER; note = 2'-O-methylcytidine-3'-phosphate
  modified_base 4: mod_base = OTHER; note = guanosine-3'-phosphate
  modified_base 5: mod_base = OTHER; note = guanosine-3'-phosphate
  modified_base 6: mod_base = OTHER; note = guanosine-3'-phosphate
  modified_base 7: mod_base = OTHER; note = 2'-O-methylcytidine-3'-phosphate
  modified_base 8: mod_base = OTHER; note = guanosine-3'-phosphate
  modified_base 9: mod_base = OTHER; note = guanosine-3'-phosphate
  modified_base 10: mod_base = OTHER; note = adenosine-3'-phosphate
  modified_base 11: mod_base = OTHER; note = 2'-O-methyluridine-3'-phosphate
  modified_base 12: mod_base = OTHER; note = guanosine-3'-phosphate
  modified_base 13: mod_base = OTHER; note = adenosine-3'-phosphate
  modified_base 14: mod_base = OTHER; note = adenosine-3'-phosphate
  modified_base 15: mod_base = OTHER; note = 2'-O-methyluridine-3'-phosphate
  modified_base 16: mod_base = OTHER; note = adenosine-3'-phosphate
  modified_base 17: mod_base = OTHER; note = 2'-O-methylcytidine-3'-phosphate
  modified_base 18: mod_base = OTHER; note = 2'-O-methylcytidine-3'-phosphate
  modified_base 19: mod_base = OTHER; note = adenosine-3'-phosphate
  modified_base 20: mod_base = OTHER; note = 2'-deoxythymidine-3'-phosphorothioate
  misc_feature 1..19: note = RNA
  misc_feature 20..21: note = DNA
accgggcggatgaataccatt

SEQ ID NO: 204 - DNA, 21 bp, synthetic construct
  source 1..21: mol_type = other DNA
  modified_base 1: mod_base = OTHER; note = uridine-3'-phosphate
  modified_base 2: mod_base = OTHER; note = guanosine-3'-phosphate
  modified_base 3: mod_base = OTHER; note = guanosine-3'-phosphate
  modified_base 4: mod_base = OTHER; note = 2'-O-methyluridine-3'-phosphate
  modified_base 5: mod_base = OTHER; note = adenosine-3'-phosphate
  modified_base 6: mod_base = OTHER; note = uridine-3'-phosphate
  modified_base 7: mod_base = OTHER; note = uridine-3'-phosphate
  modified_base 8: mod_base = OTHER; note = 2'-O-methylcytidine-3'-phosphate
  modified_base 9: mod_base = OTHER; note = adenosine-3'-phosphate
  modified_base 10: mod_base = OTHER; note = uridine-3'-phosphate
  modified_base 11: mod_base = OTHER; note = cytidine-3'-phosphate
  modified_base 12: mod_base = OTHER; note = cytidine-3'-phosphate
  modified_base 13: mod_base = OTHER; note = guanosine-3'-phosphate
  modified_base 14: mod_base = OTHER; note = cytidine-3'-phosphate
  modified_base 15: mod_base = OTHER; note = cytidine-3'-phosphate
  modified_base 16: mod_base = OTHER; note = cytidine-3'-phosphate
  modified_base 17: mod_base = OTHER; note = guanosine-3'-phosphate
  modified_base 18: mod_base = OTHER; note = guanosine-3'-phosphate
  modified_base 19: mod_base = OTHER; note = uridine-3'-phosphate
  modified_base 20: mod_base = OTHER; note = 2'-deoxythymidine-3'-phosphorothioate
  misc_feature 1..19: note = RNA
  misc_feature 20..21: note = DNA
tggtattcatccgcccggttt

SEQ ID NO: 205 - DNA, 21 bp, synthetic construct
  source 1..21: mol_type = other DNA
  modified_base 1: mod_base = OTHER; note = cytidine-3'-phosphate
  modified_base 2: mod_base = OTHER; note = cytidine-3'-phosphate
  modified_base 3: mod_base = OTHER; note = guanosine-3'-phosphate
  modified_base 4: mod_base = OTHER; note = guanosine-3'-phosphate
  modified_base 5: mod_base = OTHER; note = guanosine-3'-phosphate
  modified_base 6: mod_base = OTHER; note = cytidine-3'-phosphate
  modified_base 7: mod_base = OTHER; note = guanosine-3'-phosphate
  modified_base 8: mod_base = OTHER; note = guanosine-3'-phosphate
  modified_base 9: mod_base = OTHER; note = adenosine-3'-phosphate
  modified_base 10: mod_base = OTHER; note = uridine-3'-phosphate
  modified_base 11: mod_base = OTHER; note = guanosine-3'-phosphate
  modified_base 12: mod_base = OTHER; note = adenosine-3'-phosphate
  modified_base 13: mod_base = OTHER; note = adenosine-3'-phosphate
  modified_base 14: mod_base = OTHER; note = uridine-3'-phosphate
  modified_base 15: mod_base = OTHER; note = adenosine-3'-phosphate
  modified_base 16: mod_base = OTHER; note = cytidine-3'-phosphate
  modified_base 17: mod_base = OTHER; note = cytidine-3'-phosphate
  modified_base 18: mod_base = OTHER; note = adenosine-3'-phosphate
  modified_base 19: mod_base = OTHER; note = guanosine-3'-phosphate
  modified_base 20: mod_base = OTHER; note = 2'-deoxythymidine-3'-phosphorothioate
  misc_feature 1..19: note = RNA
  misc_feature 20..21: note = DNA
ccgggcggatgaataccagtt

SEQ ID NO: 206 - DNA, 21 bp, synthetic construct
  source 1..21: mol_type = other DNA
  modified_base 1: mod_base = OTHER; note = cytidine-3'-phosphate
  modified_base 2: mod_base = OTHER; note = uridine-3'-phosphate
  modified_base 3: mod_base = OTHER; note = guanosine-3'-phosphate
  modified_base 4: mod_base = OTHER; note = guanosine-3'-phosphate
  modified_base 5: mod_base = OTHER; note = uridine-3'-phosphate
  modified_base 6: mod_base = OTHER; note = adenosine-3'-phosphate
  modified_base 7: mod_base = OTHER; note = uridine-3'-phosphate
  modified_base 8: mod_base = OTHER; note = uridine-3'-phosphate
  modified_base 9: mod_base = OTHER; note = cytidine-3'-phosphate
  modified_base 10: mod_base = OTHER; note = adenosine-3'-phosphate
  modified_base 11: mod_base = OTHER; note = uridine-3'-phosphate
  modified_base 12: mod_base = OTHER; note = cytidine-3'-phosphate
  modified_base 13: mod_base = OTHER; note = cytidine-3'-phosphate
  modified_base 14: mod_base = OTHER; note = guanosine-3'-phosphate
  modified_base 15: mod_base = OTHER; note = cytidine-3'-phosphate
  modified_base 16: mod_base = OTHER; note = cytidine-3'-phosphate
  modified_base 17: mod_base = OTHER; note = cytidine-3'-phosphate
  modified_base 18: mod_base = OTHER; note = guanosine-3'-phosphate
  modified_base 19: mod_base = OTHER; note = guanosine-3'-phosphate
  modified_base 20: mod_base = OTHER; note = 2'-deoxythymidine-3'-phosphorothioate
  misc_feature 1..19: note = RNA
  misc_feature 20..21: note = DNA
ctggtattcatccgcccggtt

SEQ ID NO: 207 - DNA, 21 bp, synthetic construct
  source 1..21: mol_type = other DNA
  modified_base 1: mod_base = OTHER; note = 2'-O-methylcytidine-3'-phosphate
  modified_base 2: mod_base = OTHER; note = 2'-O-methylcytidine-3'-phosphate
  modified_base 3: mod_base = OTHER; note = guanosine-3'-phosphate
  modified_base 4: mod_base = OTHER; note = guanosine-3'-phosphate
  modified_base 5: mod_base = OTHER; note = guanosine-3'-phosphate
  modified_base 6: mod_base = OTHER; note = 2'-O-methylcytidine-3'-phosphate
  modified_base 7: mod_base = OTHER; note = guanosine-3'-phosphate
  modified_base 8: mod_base = OTHER; note = guanosine-3'-phosphate
  modified_base 9: mod_base = OTHER; note = adenosine-3'-phosphate
  modified_base 10: mod_base = OTHER; note = 2'-O-methyluridine-3'-phosphate
  modified_base 11: mod_base = OTHER; note = guanosine-3'-phosphate
  modified_base 12: mod_base = OTHER; note = adenosine-3'-phosphate
  modified_base 13: mod_base = OTHER; note = adenosine-3'-phosphate
  modified_base 14: mod_base = OTHER; note = 2'-O-methyluridine-3'-phosphate
  modified_base 15: mod_base = OTHER; note = adenosine-3'-phosphate
  modified_base 16: mod_base = OTHER; note = 2'-O-methylcytidine-3'-phosphate
  modified_base 17: mod_base = OTHER; note = 2'-O-methylcytidine-3'-phosphate
  modified_base 18: mod_base = OTHER; note = adenosine-3'-phosphate
  modified_base 19: mod_base = OTHER; note = guanosine-3'-phosphate
  modified_base 20: mod_base = OTHER; note = 2'-deoxythymidine-3'-phosphorothioate
  misc_feature 1..19: note = RNA
  misc_feature 20..21: note = DNA
ccgggcggatgaataccagtt

SEQ ID NO: 208 - DNA, 21 bp, synthetic construct
  source 1..21: mol_type = other DNA
  modified_base 1: mod_base = OTHER; note = cytidine-3'-phosphate
  modified_base 2: mod_base = OTHER; note = uridine-3'-phosphate
  modified_base 3: mod_base = OTHER; note = guanosine-3'-phosphate
  modified_base 4: mod_base = OTHER; note = guanosine-3'-phosphate
  modified_base 5: mod_base = OTHER; note = 2'-O-methyluridine-3'-phosphate
  modified_base 6: mod_base = OTHER; note = adenosine-3'-phosphate
  modified_base 7: mod_base = OTHER; note = uridine-3'-phosphate
  modified_base 8: mod_base = OTHER; note = uridine-3'-phosphate
  modified_base 9: mod_base = OTHER; note = 2'-O-methylcytidine-3'-phosphate
  modified_base 10: mod_base = OTHER; note = adenosine-3'-phosphate
  modified_base 11: mod_base = OTHER; note = uridine-3'-phosphate
  modified_base 12: mod_base = OTHER; note = cytidine-3'-phosphate
  modified_base 13: mod_base = OTHER; note = cytidine-3'-phosphate
  modified_base 14: mod_base = OTHER; note = guanosine-3'-phosphate
  modified_base 15: mod_base = OTHER; note = cytidine-3'-phosphate
  modified_base 16: mod_base = OTHER; note = cytidine-3'-phosphate
  modified_base 17: mod_base = OTHER; note = cytidine-3'-phosphate
  modified_base 18: mod_base = OTHER; note = guanosine-3'-phosphate
  modified_base 19: mod_base = OTHER; note = guanosine-3'-phosphate
  modified_base 20: mod_base = OTHER; note = 2'-deoxythymidine-3'-phosphorothioate
  misc_feature 1..19: note = RNA
  misc_feature 20..21: note = DNA
ctggtattcatccgcccggtt

SEQ ID NO: 209 - DNA, 21 bp, synthetic construct
  source 1..21: mol_type = other DNA
  modified_base 1: mod_base = OTHER; note = cytidine-3'-phosphate
  modified_base 2: mod_base = OTHER; note = cytidine-3'-phosphate
  modified_base 3: mod_base = OTHER; note = uridine-3'-phosphate
  modified_base 4: mod_base = OTHER; note = guanosine-3'-phosphate
  modified_base 5: mod_base = OTHER; note = guanosine-3'-phosphate
  modified_base 6: mod_base = OTHER; note = uridine-3'-phosphate
  modified_base 7: mod_base = OTHER; note = guanosine-3'-phosphate
  modified_base 8: mod_base = OTHER; note = guanosine-3'-phosphate
  modified_base 9: mod_base = OTHER; note = adenosine-3'-phosphate
  modified_base 10: mod_base = OTHER; note = guanosine-3'-phosphate
  modified_base 11: mod_base = OTHER; note = guanosine-3'-phosphate
  modified_base 12: mod_base = OTHER; note = uridine-3'-phosphate
  modified_base 13: mod_base = OTHER; note = guanosine-3'-phosphate
  modified_base 14: mod_base = OTHER; note = uridine-3'-phosphate
  modified_base 15: mod_base = OTHER; note = adenosine-3'-phosphate
  modified_base 16: mod_base = OTHER; note = uridine-3'-phosphate
  modified_base 17: mod_base = OTHER; note = cytidine-3'-phosphate
  modified_base 18: mod_base = OTHER; note = uridine-3'-phosphate
  modified_base 19: mod_base = OTHER; note = cytidine-3'-phosphate
  modified_base 20: mod_base = OTHER; note = 2'-deoxythymidine-3'-phosphorothioate
  misc_feature 1..19: note = RNA
  misc_feature 20..21: note = DNA
cctggtggaggtgtatctctt

SEQ ID NO: 210 - DNA, 21 bp, synthetic construct
  source 1..21: mol_type = other DNA
  modified_base 1: mod_base = OTHER; note = guanosine-3'-phosphate
  modified_base 2: mod_base = OTHER; note = adenosine-3'-phosphate
  modified_base 3: mod_base = OTHER; note = guanosine-3'-phosphate
  modified_base 4: mod_base = OTHER; note = adenosine-3'-phosphate
  modified_base 5: mod_base = OTHER; note = uridine-3'-phosphate
  modified_base 6: mod_base = OTHER; note = adenosine-3'-phosphate
  modified_base 7: mod_base = OTHER; note = cytidine-3'-phosphate
  modified_base 8: mod_base = OTHER; note = adenosine-3'-phosphate
  modified_base 9: mod_base = OTHER; note = cytidine-3'-phosphate
  modified_base 10: mod_base = OTHER; note = cytidine-3'-phosphate
  modified_base 11: mod_base = OTHER; note = uridine-3'-phosphate
  modified_base 12: mod_base = OTHER; note = cytidine-3'-phosphate
  modified_base 13: mod_base = OTHER; note = cytidine-3'-phosphate
  modified_base 14: mod_base = OTHER; note = adenosine-3'-phosphate
  modified_base 15: mod_base = OTHER; note = cytidine-3'-phosphate
  modified_base 16: mod_base = OTHER; note = cytidine-3'-phosphate
  modified_base 17: mod_base = OTHER; note = adenosine-3'-phosphate
  modified_base 18: mod_base = OTHER; note = guanosine-3'-phosphate
  modified_base 19: mod_base = OTHER; note = guanosine-3'-phosphate
  modified_base 20: mod_base = OTHER; note = 2'-deoxythymidine-3'-phosphorothioate
  misc_feature 1..19: note = RNA
  misc_feature 20..21: note = DNA
gagatacacctccaccaggtt

SEQ ID NO: 211 - DNA, 21 bp, synthetic construct
  source 1..21: mol_type = other DNA
  modified_base 1: mod_base = OTHER; note = 2'-O-methylcytidine-3'-phosphate
  modified_base 2: mod_base = OTHER; note = 2'-O-methylcytidine-3'-phosphate
  modified_base 3: mod_base = OTHER; note = 2'-O-methyluridine-3'-phosphate
  modified_base 4: mod_base = OTHER; note = guanosine-3'-phosphate
  modified_base 5: mod_base = OTHER; note = guanosine-3'-phosphate
  modified_base 6: mod_base = OTHER; note = 2'-O-methyluridine-3'-phosphate
  modified_base 7: mod_base = OTHER; note = guanosine-3'-phosphate
  modified_base 8: mod_base = OTHER; note = guanosine-3'-phosphate
  modified_base 9: mod_base = OTHER; note = adenosine-3'-phosphate
  modified_base 10: mod_base = OTHER; note = guanosine-3'-phosphate
  modified_base 11: mod_base = OTHER; note = guanosine-3'-phosphate
  modified_base 12: mod_base = OTHER; note = 2'-O-methyluridine-3'-phosphate
  modified_base 13: mod_base = OTHER; note = guanosine-3'-phosphate
  modified_base 14: mod_base = OTHER; note = 2'-O-methyluridine-3'-phosphate
  modified_base 15: mod_base = OTHER; note = adenosine-3'-phosphate
  modified_base 16: mod_base = OTHER; note = 2'-O-methyluridine-3'-phosphate
  modified_base 17: mod_base = OTHER; note = 2'-O-methylcytidine-3'-phosphate
  modified_base 18: mod_base = OTHER; note = 2'-O-methyluridine-3'-phosphate
  modified_base 19: mod_base = OTHER; note = 2'-O-methylcytidine-3'-phosphate
  modified_base 20: mod_base = OTHER; note = 2'-deoxythymidine-3'-phosphorothioate
  misc_feature 1..19: note = RNA
  misc_feature 20..21: note = DNA
cctggtggaggtgtatctctt

SEQ ID NO: 212 - DNA, 21 bp, synthetic construct
  source 1..21: mol_type = other DNA
  modified_base 1: mod_base = OTHER; note = guanosine-3'-phosphate
  modified_base 2: mod_base = OTHER; note = adenosine-3'-phosphate
  modified_base 3: mod_base = OTHER; note = guanosine-3'-phosphate
  modified_base 4: mod_base = OTHER; note = adenosine-3'-phosphate
  modified_base 5: mod_base = OTHER; note = 2'-O-methyluridine-3'-phosphate
  modified_base 6: mod_base = OTHER; note = adenosine-3'-phosphate
  modified_base 7: mod_base = OTHER; note = 2'-O-methylcytidine-3'-phosphate
  modified_base 8: mod_base = OTHER; note = adenosine-3'-phosphate
  modified_base 9: mod_base = OTHER; note = cytidine-3'-phosphate
  modified_base 10: mod_base = OTHER; note = cytidine-3'-phosphate
  modified_base 11: mod_base = OTHER; note = uridine-3'-phosphate
  modified_base 12: mod_base = OTHER; note = cytidine-3'-phosphate
  modified_base 13: mod_base = OTHER; note = 2'-O-methylcytidine-3'-phosphate
  modified_base 14: mod_base = OTHER; note = adenosine-3'-phosphate
  modified_base 15: mod_base = OTHER; note = cytidine-3'-phosphate
  modified_base 16: mod_base = OTHER; note = 2'-O-methylcytidine-3'-phosphate
  modified_base 17: mod_base = OTHER; note = adenosine-3'-phosphate
  modified_base 18: mod_base = OTHER; note = guanosine-3'-phosphate
  modified_base 19: mod_base = OTHER; note = guanosine-3'-phosphate
  modified_base 20: mod_base = OTHER; note = 2'-deoxythymidine-3'-phosphorothioate
  misc_feature 1..19: note = RNA
  misc_feature 20..21: note = DNA
gagatacacctccaccaggtt

SEQ ID NO: 213 - DNA, 21 bp, synthetic construct
  source 1..21: mol_type = other DNA
  modified_base 1: mod_base = OTHER; note = cytidine-3'-phosphate
  modified_base 2: mod_base = OTHER; note = uridine-3'-phosphate
  modified_base 3: mod_base = OTHER; note = guanosine-3'-phosphate
  modified_base 4: mod_base = OTHER; note = guanosine-3'-phosphate
  modified_base 5: mod_base = OTHER; note = uridine-3'-phosphate
  modified_base 6: mod_base = OTHER; note = guanosine-3'-phosphate
  modified_base 7: mod_base = OTHER; note = guanosine-3'-phosphate
  modified_base 8: mod_base = OTHER; note = adenosine-3'-phosphate
  modified_base 9: mod_base = OTHER; note = guanosine-3'-phosphate
  modified_base 10: mod_base = OTHER; note = guanosine-3'-phosphate
  modified_base 11: mod_base = OTHER; note = uridine-3'-phosphate
  modified_base 12: mod_base = OTHER; note = guanosine-3'-phosphate
  modified_base 13: mod_base = OTHER; note = uridine-3'-phosphate
  modified_base 14: mod_base = OTHER; note = adenosine-3'-phosphate
  modified_base 15: mod_base = OTHER; note = uridine-3'-phosphate
  modified_base 16: mod_base = OTHER; note = cytidine-3'-phosphate
  modified_base 17: mod_base = OTHER; note = uridine-3'-phosphate
  modified_base 18: mod_base = OTHER; note = cytidine-3'-phosphate
  modified_base 19: mod_base = OTHER; note = cytidine-3'-phosphate
  modified_base 20: mod_base = OTHER; note = 2'-deoxythymidine-3'-phosphorothioate
  misc_feature 1..19: note = RNA
  misc_feature 20..21: note = DNA
ctggtggaggtgtatctcctt

SEQ ID NO: 214 - DNA, 21 bp, synthetic construct
  source 1..21: mol_type = other DNA
  modified_base 1: mod_base = OTHER; note = guanosine-3'-phosphate
  modified_base 2: mod_base = OTHER; note = guanosine-3'-phosphate
  modified_base 3: mod_base = OTHER; note = adenosine-3'-phosphate
  modified_base 4: mod_base = OTHER; note = guanosine-3'-phosphate
  modified_base 5: mod_base = OTHER; note = adenosine-3'-phosphate
  modified_base 6: mod_base = OTHER; note = uridine-3'-phosphate
  modified_base 7: mod_base = OTHER; note = adenosine-3'-phosphate
  modified_base 8: mod_base = OTHER; note = cytidine-3'-phosphate
  modified_base 9: mod_base = OTHER; note = adenosine-3'-phosphate
  modified_base 10: mod_base = OTHER; note = cytidine-3'-phosphate
  modified_base 11: mod_base = OTHER; note = cytidine-3'-phosphate
  modified_base 12: mod_base = OTHER; note = uridine-3'-phosphate
  modified_base 13: mod_base = OTHER; note = cytidine-3'-phosphate
  modified_base 14: mod_base = OTHER; note = cytidine-3'-phosphate
  modified_base 15: mod_base = OTHER; note = adenosine-3'-phosphate
  modified_base 16: mod_base = OTHER; note = cytidine-3'-phosphate
  modified_base 17: mod_base = OTHER; note = cytidine-3'-phosphate
  modified_base 18: mod_base = OTHER; note = adenosine-3'-phosphate
  modified_base 19: mod_base = OTHER; note = guanosine-3'-phosphate
  modified_base 20: mod_base = OTHER; note = 2'-deoxythymidine-3'-phosphorothioate
  misc_feature 1..19: note = RNA
  misc_feature 20..21: note = DNA
ggagatacacctccaccagtt

SEQ ID NO: 215 - DNA, 21 bp, synthetic construct
  source 1..21: mol_type = other DNA
  modified_base 1: mod_base = OTHER; note = 2'-O-methylcytidine-3'-phosphate
  modified_base 2: mod_base = OTHER; note = 2'-O-methyluridine-3'-phosphate
  modified_base 3: mod_base = OTHER; note = guanosine-3'-phosphate
  modified_base 4: mod_base = OTHER; note = guanosine-3'-phosphate
  modified_base 5: mod_base = OTHER; note = 2'-O-methyluridine-3'-phosphate
  modified_base 6: mod_base = OTHER; note = guanosine-3'-phosphate
  modified_base 7: mod_base = OTHER; note = guanosine-3'-phosphate
  modified_base 8: mod_base = OTHER; note = adenosine-3'-phosphate
  modified_base 9: mod_base = OTHER; note = guanosine-3'-phosphate
  modified_base 10: mod_base = OTHER; note = guanosine-3'-phosphate
  modified_base 11: mod_base = OTHER; note = 2'-O-methyluridine-3'-phosphate
  modified_base 12: mod_base = OTHER; note = guanosine-3'-phosphate
  modified_base 13: mod_base = OTHER; note = 2'-O-methyluridine-3'-phosphate
  modified_base 14: mod_base = OTHER; note = adenosine-3'-phosphate
  modified_base 15: mod_base = OTHER; note = 2'-O-methyluridine-3'-phosphate
  modified_base 16: mod_base = OTHER; note = 2'-O-methylcytidine-3'-phosphate
  modified_base 17: mod_base = OTHER; note = 2'-O-methyluridine-3'-phosphate
  modified_base 18: mod_base = OTHER; note = 2'-O-methylcytidine-3'-phosphate
  modified_base 19: mod_base = OTHER; note = 2'-O-methylcytidine-3'-phosphate
  modified_base 20: mod_base = OTHER; note = 2'-deoxythymidine-3'-phosphorothioate
  misc_feature 1..19: note = RNA
  misc_feature 20..21: note = DNA
ctggtggaggtgtatctcctt

SEQ ID NO: 216 - DNA, 21 bp, synthetic construct
  source 1..21: mol_type = other DNA
  modified_base 1: mod_base = OTHER; note = guanosine-3'-phosphate
  modified_base 2: mod_base = OTHER; note = guanosine-3'-phosphate
  modified_base 3: mod_base = OTHER; note = adenosine-3'-phosphate
  modified_base 4: mod_base = OTHER; note = guanosine-3'-phosphate
  modified_base 5: mod_base = OTHER; note = adenosine-3'-phosphate
  modified_base 6: mod_base = OTHER; note = 2'-O-methyluridine-3'-phosphate
  modified_base 7: mod_base = OTHER; note = adenosine-3'-phosphate
  modified_base 8: mod_base = OTHER; note = 2'-O-methylcytidine-3'-phosphate
  modified_base 9: mod_base = OTHER; note = adenosine-3'-phosphate
  modified_base 10: mod_base = OTHER; note = cytidine-3'-phosphate
  modified_base 11: mod_base = OTHER; note = cytidine-3'-phosphate
  modified_base 12: mod_base = OTHER; note = uridine-3'-phosphate
  modified_base 13: mod_base = OTHER; note = cytidine-3'-phosphate
  modified_base 14: mod_base = OTHER; note = 2'-O-methylcytidine-3'-phosphate
  modified_base 15: mod_base = OTHER; note = adenosine-3'-phosphate
  modified_base 16: mod_base = OTHER; note = cytidine-3'-phosphate
  modified_base 17: mod_base = OTHER; note = 2'-O-methylcytidine-3'-phosphate
  modified_base 18: mod_base = OTHER; note = adenosine-3'-phosphate
  modified_base 19: mod_base = OTHER; note = guanosine-3'-phosphate
  modified_base 20: mod_base = OTHER; note = 2'-deoxythymidine-3'-phosphorothioate
  misc_feature 1..19: note = RNA
  misc_feature 20..21: note = DNA
ggagatacacctccaccagtt

SEQ ID NO: 217 - DNA, 21 bp, synthetic construct
  source 1..21: mol_type = other DNA
  modified_base 1: mod_base = OTHER; note = uridine-3'-phosphate
  modified_base 2: mod_base = OTHER; note = guanosine-3'-phosphate
  modified_base 3: mod_base = OTHER; note = guanosine-3'-phosphate
  modified_base 4: mod_base = OTHER; note = uridine-3'-phosphate
  modified_base 5: mod_base = OTHER; note = guanosine-3'-phosphate
  modified_base 6: mod_base = OTHER; note = guanosine-3'-phosphate
  modified_base 7: mod_base = OTHER; note = adenosine-3'-phosphate
  modified_base 8: mod_base = OTHER; note = guanosine-3'-phosphate
  modified_base 9: mod_base = OTHER; note = guanosine-3'-phosphate
  modified_base 10: mod_base = OTHER; note = uridine-3'-phosphate
  modified_base 11: mod_base = OTHER; note = guanosine-3'-phosphate
  modified_base 12: mod_base = OTHER; note = uridine-3'-phosphate
  modified_base 13: mod_base = OTHER; note = adenosine-3'-phosphate
  modified_base 14: mod_base = OTHER; note = uridine-3'-phosphate
  modified_base 15: mod_base = OTHER; note = cytidine-3'-phosphate
  modified_base 16: mod_base = OTHER; note = uridine-3'-phosphate
  modified_base 17: mod_base = OTHER; note = cytidine-3'-phosphate
  modified_base 18: mod_base = OTHER; note = cytidine-3'-phosphate
  modified_base 19: mod_base = OTHER; note = uridine-3'-phosphate
  modified_base 20: mod_base = OTHER; note = 2'-deoxythymidine-3'-phosphorothioate
  misc_feature 1..19: note = RNA
  misc_feature 20..21: note = DNA
tggtggaggtgtatctccttt

SEQ ID NO: 218 - DNA, 21 bp, synthetic construct
  source 1..21: mol_type = other DNA
  modified_base 1: mod_base = OTHER; note = adenosine-3'-phosphate
  modified_base 2: mod_base = OTHER; note = guanosine-3'-phosphate
  modified_base 3: mod_base = OTHER; note = guanosine-3'-phosphate
  modified_base 4: mod_base = OTHER; note = adenosine-3'-phosphate
  modified_base 5: mod_base = OTHER; note = guanosine-3'-phosphate
  modified_base 6: mod_base = OTHER; note = adenosine-3'-phosphate
  modified_base 7: mod_base = OTHER; note = uridine-3'-phosphate
  modified_base 8: mod_base = OTHER; note = adenosine-3'-phosphate
  modified_base 9: mod_base = OTHER; note = cytidine-3'-phosphate
  modified_base 10: mod_base = OTHER; note = adenosine-3'-phosphate
  modified_base 11: mod_base = OTHER; note = cytidine-3'-phosphate
  modified_base 12: mod_base = OTHER; note = cytidine-3'-phosphate
  modified_base 13: mod_base = OTHER; note = uridine-3'-phosphate
  modified_base 14: mod_base = OTHER; note = cytidine-3'-phosphate
  modified_base 15: mod_base = OTHER; note = cytidine-3'-phosphate
  modified_base 16: mod_base = OTHER; note = adenosine-3'-phosphate
  modified_base 17: mod_base = OTHER; note = cytidine-3'-phosphate
  modified_base 18: mod_base = OTHER; note = cytidine-3'-phosphate
  modified_base 19: mod_base = OTHER; note = adenosine-3'-phosphate
  modified_base 20: mod_base = OTHER; note = 2'-deoxythymidine-3'-phosphorothioate
  misc_feature 1..19: note = RNA
  misc_feature 20..21: note = DNA
aggagatacacctccaccatt

SEQ ID NO: 219 - DNA, 21 bp, synthetic construct
  source 1..21: mol_type = other DNA
  modified_base 1: mod_base = OTHER; note = 2'-O-methyluridine-3'-phosphate
  modified_base 2: mod_base = OTHER; note = guanosine-3'-phosphate
  modified_base 3: mod_base = OTHER; note = guanosine-3'-phosphate
  modified_base 4: mod_base = OTHER; note = 2'-O-methyluridine-3'-phosphate
  modified_base 5: mod_base = OTHER; note = guanosine-3'-phosphate
  modified_base 6: mod_base = OTHER; note = guanosine-3'-phosphate
  modified_base 7: mod_base = OTHER; note = adenosine-3'-phosphate
  modified_base 8: mod_base = OTHER; note = guanosine-3'-phosphate
  modified_base 9: mod_base = OTHER; note = guanosine-3'-phosphate
  modified_base 10: mod_base = OTHER; note = 2'-O-methyluridine-3'-phosphate
  modified_base 11: mod_base = OTHER; note = guanosine-3'-phosphate
  modified_base 12: mod_base = OTHER; note = 2'-O-methyluridine-3'-phosphate
  modified_base 13: mod_base = OTHER; note = adenosine-3'-phosphate
  modified_base 14: mod_base = OTHER; note = 2'-O-methyluridine-3'-phosphate
  modified_base 15: mod_base = OTHER; note = 2'-O-methylcytidine-3'-phosphate
  modified_base 16: mod_base = OTHER; note = 2'-O-methyluridine-3'-phosphate
  modified_base 17: mod_base = OTHER; note = 2'-O-methylcytidine-3'-phosphate
  modified_base 18: mod_base = OTHER; note = 2'-O-methylcytidine-3'-phosphate
  modified_base 19: mod_base = OTHER; note = 2'-O-methyluridine-3'-phosphate
  modified_base 20: mod_base = OTHER; note = 2'-deoxythymidine-3'-phosphorothioate
  misc_feature 1..19: note = RNA
  misc_feature 20..21: note = DNA
tggtggaggtgtatctccttt

SEQ ID NO: 220 - DNA, 21 bp, synthetic construct
  source 1..21: mol_type = other DNA
  modified_base 1: mod_base = OTHER; note = adenosine-3'-phosphate
  modified_base 2: mod_base = OTHER; note = guanosine-3'-phosphate
  modified_base 3: mod_base = OTHER; note = guanosine-3'-phosphate
  modified_base 4: mod_base = OTHER; note = adenosine-3'-phosphate
  modified_base 5: mod_base = OTHER; note = guanosine-3'-phosphate
  modified_base 6: mod_base = OTHER; note = adenosine-3'-phosphate
  modified_base 7: mod_base = OTHER; note = 2'-O-methyluridine-3'-phosphate
  modified_base 8: mod_base = OTHER; note = adenosine-3'-phosphate
  modified_base 9: mod_base = OTHER; note = 2'-O-methylcytidine-3'-phosphate
  modified_base 10: mod_base = OTHER; note = adenosine-3'-phosphate
  modified_base 11: mod_base = OTHER; note = cytidine-3'-phosphate
  modified_base 12: mod_base = OTHER; note = cytidine-3'-phosphate
  modified_base 13: mod_base = OTHER; note = uridine-3'-phosphate
  modified_base 14: mod_base = OTHER; note = cytidine-3'-phosphate
  modified_base 15: mod_base = OTHER; note = 2'-O-methylcytidine-3'-phosphate
  modified_base 16: mod_base = OTHER; note = adenosine-3'-phosphate
  modified_base 17: mod_base = OTHER; note = cytidine-3'-phosphate
  modified_base 18: mod_base = OTHER; note = 2'-O-methylcytidine-3'-phosphate
  modified_base 19: mod_base = OTHER; note = adenosine-3'-phosphate
  modified_base 20: mod_base = OTHER; note = 2'-deoxythymidine-3'-phosphorothioate
  misc_feature 1..19: note = RNA
  misc_feature 20..21: note = DNA
aggagatacacctccaccatt

SEQ ID NO: 221 - DNA, 21 bp, synthetic construct
  source 1..21: mol_type = other DNA
  modified_base 1: mod_base = OTHER; note = guanosine-3'-phosphate
  modified_base 2: mod_base = OTHER; note = guanosine-3'-phosphate
  modified_base 3: mod_base = OTHER; note = uridine-3'-phosphate
  modified_base 4: mod_base = OTHER; note = guanosine-3'-phosphate
  modified_base 5: mod_base = OTHER; note = guanosine-3'-phosphate
  modified_base 6: mod_base = OTHER; note = adenosine-3'-phosphate
  modified_base 7: mod_base = OTHER; note = guanosine-3'-phosphate
  modified_base 8: mod_base = OTHER; note = guanosine-3'-phosphate
  modified_base 9: mod_base = OTHER; note = uridine-3'-phosphate
  modified_base 10: mod_base = OTHER; note = guanosine-3'-phosphate
  modified_base 11: mod_base = OTHER; note = uridine-3'-phosphate
  modified_base 12: mod_base = OTHER; note = adenosine-3'-phosphate
  modified_base 13: mod_base = OTHER; note = uridine-3'-phosphate
  modified_base 14: mod_base = OTHER; note = cytidine-3'-phosphate
  modified_base 15: mod_base = OTHER; note = uridine-3'-phosphate
  modified_base 16: mod_base = OTHER; note = cytidine-3'-phosphate
  modified_base 17: mod_base = OTHER; note = cytidine-3'-phosphate
  modified_base 18: mod_base = OTHER; note = uridine-3'-phosphate
  modified_base 19: mod_base = OTHER; note = adenosine-3'-phosphate
  modified_base 20: mod_base = OTHER; note = 2'-deoxythymidine-3'-phosphorothioate
  misc_feature 1..19: note = RNA
  misc_feature 20..21: note = DNA
ggtggaggtgtatctcctatt

SEQ ID NO: 222 - DNA, 21 bp, synthetic construct
  source 1..21: mol_type = other DNA
  modified_base 1: mod_base = OTHER; note = uridine-3'-phosphate
  modified_base 2: mod_base = OTHER; note = adenosine-3'-phosphate
  modified_base 3: mod_base = OTHER; note = guanosine-3'-phosphate
  modified_base 4: mod_base = OTHER; note = guanosine-3'-phosphate
  modified_base 5: mod_base = OTHER; note = adenosine-3'-phosphate
  modified_base 6: mod_base = OTHER; note = guanosine-3'-phosphate
  modified_base 7: mod_base = OTHER; note = adenosine-3'-phosphate
  modified_base 8: mod_base = OTHER; note = uridine-3'-phosphate
  modified_base 9: mod_base = OTHER; note = adenosine-3'-phosphate
  modified_base 10: mod_base = OTHER; note = cytidine-3'-phosphate
  modified_base 11: mod_base = OTHER; note = adenosine-3'-phosphate
  modified_base 12: mod_base = OTHER; note = cytidine-3'-phosphate
  modified_base 13: mod_base = OTHER; note = cytidine-3'-phosphate
  modified_base 14: mod_base = OTHER; note = uridine-3'-phosphate
  modified_base 15: mod_base = OTHER; note = cytidine-3'-phosphate
  modified_base 16: mod_base = OTHER; note = cytidine-3'-phosphate
  modified_base 17: mod_base = OTHER; note = adenosine-3'-phosphate
  modified_base 18: mod_base = OTHER; note = cytidine-3'-phosphate
  modified_base 19: mod_base = OTHER; note = cytidine-3'-phosphate
  modified_base 20: mod_base = OTHER; note = 2'-deoxythymidine-3'-phosphorothioate
  misc_feature 1..19: note = RNA
  misc_feature 20..21: note = DNA
taggagatacacctccacctt

SEQ ID NO: 223 - DNA, 21 bp, synthetic construct
  source 1..21: mol_type = other DNA
  modified_base 1: mod_base = OTHER; note = guanosine-3'-phosphate
  modified_base 2: mod_base = OTHER; note = guanosine-3'-phosphate
  modified_base 3: mod_base = OTHER; note = 2'-O-methyluridine-3'-phosphate
  modified_base 4: mod_base = OTHER; note = guanosine-3'-phosphate
  modified_base 5: mod_base = OTHER; note = guanosine-3'-phosphate
  modified_base 6: mod_base = OTHER; note = adenosine-3'-phosphate
  modified_base 7: mod_base = OTHER; note = guanosine-3'-phosphate
  modified_base 8: mod_base = OTHER; note = guanosine-3'-phosphate
  modified_base 9: mod_base = OTHER; note = 2'-O-methyluridine-3'-phosphate
  modified_base 10: mod_base = OTHER; note = guanosine-3'-phosphate
  modified_base 11: mod_base = OTHER; note = 2'-O-methyluridine-3'-phosphate
  modified_base 12: mod_base = OTHER; note = adenosine-3'-phosphate
  modified_base 13: mod_base = OTHER; note = 2'-O-methyluridine-3'-phosphate
  modified_base 14: mod_base = OTHER; note = 2'-O-methylcytidine-3'-phosphate
  modified_base 15: mod_base = OTHER; note = 2'-O-methyluridine-3'-phosphate
  modified_base 16: mod_base = OTHER; note = 2'-O-methylcytidine-3'-phosphate
  modified_base 17: mod_base = OTHER; note = 2'-O-methylcytidine-3'-phosphate
  modified_base 18: mod_base = OTHER; note = 2'-O-methyluridine-3'-phosphate
  modified_base 19: mod_base = OTHER; note = adenosine-3'-phosphate
  modified_base 20: mod_base = OTHER; note = 2'-deoxythymidine-3'-phosphorothioate
  misc_feature 1..19: note = RNA
  misc_feature 20..21: note = DNA
ggtggaggtgtatctcctatt

SEQ ID NO: 224 - DNA, 21 bp, synthetic construct
  source 1..21: mol_type = other DNA
  modified_base 1: mod_base = OTHER; note = 2'-O-methyluridine-3'-phosphate
  modified_base 2: mod_base = OTHER; note = adenosine-3'-phosphate
  modified_base 3: mod_base = OTHER; note = guanosine-3'-phosphate
  modified_base 4: mod_base = OTHER; note = guanosine-3'-phosphate
  modified_base 5: mod_base = OTHER; note = adenosine-3'-phosphate
  modified_base 6: mod_base = OTHER; note = guanosine-3'-phosphate
  modified_base 7: mod_base = OTHER; note = adenosine-3'-phosphate
  modified_base 8: mod_base = OTHER; note = 2'-O-methyluridine-3'-phosphate
  modified_base 9: mod_base = OTHER; note = adenosine-3'-phosphate
  modified_base 10: mod_base = OTHER; note = 2'-O-methylcytidine-3'-phosphate
  modified_base 11: mod_base = OTHER; note = adenosine-3'-phosphate
  modified_base 12: mod_base = OTHER; note = cytidine-3'-phosphate
  modified_base 13: mod_base = OTHER; note = cytidine-3'-phosphate
  modified_base 14: mod_base = OTHER; note = uridine-3'-phosphate
  modified_base 15: mod_base = OTHER; note = cytidine-3'-phosphate
  modified_base 16: mod_base = OTHER; note = 2'-O-methylcytidine-3'-phosphate
  modified_base 17: mod_base = OTHER; note = adenosine-3'-phosphate
  modified_base 18: mod_base = OTHER; note = cytidine-3'-phosphate
  modified_base 19: mod_base = OTHER; note = cytidine-3'-phosphate
  modified_base 20: mod_base = OTHER; note = 2'-deoxythymidine-3'-phosphorothioate
  misc_feature 1..19: note = RNA
  misc_feature 20..21: note = DNA
taggagatacacctccacctt

SEQ ID NO: 225 - DNA, 21 bp, synthetic construct
  source 1..21: mol_type = other DNA
  modified_base 1: mod_base = OTHER; note = guanosine-3'-phosphate
  modified_base 2: mod_base = OTHER; note = guanosine-3'-phosphate
  modified_base 3: mod_base = OTHER; note = adenosine-3'-phosphate
  modified_base 4: mod_base = OTHER; note = guanosine-3'-phosphate
  modified_base 5: mod_base = OTHER; note = guanosine-3'-phosphate
  modified_base 6: mod_base = OTHER; note = uridine-3'-phosphate
  modified_base 7: mod_base = OTHER; note = guanosine-3'-phosphate
  modified_base 8: mod_base = OTHER; note = uridine-3'-phosphate
  modified_base 9: mod_base = OTHER; note = adenosine-3'-phosphate
  modified_base 10: mod_base = OTHER; note = uridine-3'-phosphate
  modified_base 11: mod_base = OTHER; note = cytidine-3'-phosphate
  modified_base 12: mod_base = OTHER; note = uridine-3'-phosphate
  modified_base 13: mod_base = OTHER; note = cytidine-3'-phosphate
  modified_base 14: mod_base = OTHER; note = cytidine-3'-phosphate
  modified_base 15: mod_base = OTHER; note = uridine-3'-phosphate
  modified_base 16: mod_base = OTHER; note = adenosine-3'-phosphate
  modified_base 17: mod_base = OTHER; note = guanosine-3'-phosphate
  modified_base 18: mod_base = OTHER; note = adenosine-3'-phosphate
  modified_base 19: mod_base = OTHER; note = cytidine-3'-phosphate
  modified_base 20: mod_base = OTHER; note = 2'-deoxythymidine-3'-phosphorothioate
  misc_feature 1..19: note = RNA
  misc_feature 20..21: note = DNA
ggaggtgtatctcctagactt

SEQ ID NO: 226 - DNA, 21 bp, synthetic construct
  source 1..21: mol_type = other DNA
  modified_base 1: mod_base = OTHER; note = guanosine-3'-phosphate
  modified_base 2: mod_base = OTHER; note = uridine-3'-phosphate
  modified_base 3: mod_base = OTHER; note = cytidine-3'-phosphate
  modified_base 4: mod_base = OTHER; note = uridine-3'-phosphate
  modified_base 5: mod_base = OTHER; note = adenosine-3'-phosphate
  modified_base 6: mod_base = OTHER; note = guanosine-3'-phosphate
  modified_base 7: mod_base = OTHER; note = guanosine-3'-phosphate
  modified_base 8: mod_base = OTHER; note = adenosine-3'-phosphate
  modified_base 9: mod_base = OTHER; note = guanosine-3'-phosphate
  modified_base 10: mod_base = OTHER; note = adenosine-3'-phosphate
  modified_base 11: mod_base = OTHER; note = uridine-3'-phosphate
  modified_base 12: mod_base = OTHER; note = adenosine-3'-phosphate
  modified_base 13: mod_base = OTHER; note = cytidine-3'-phosphate
  modified_base 14: mod_base = OTHER; note = adenosine-3'-phosphate
  modified_base 15: mod_base = OTHER; note = cytidine-3'-phosphate
  modified_base 16: mod_base = OTHER; note = cytidine-3'-phosphate
  modified_base 17: mod_base = OTHER; note = uridine-3'-phosphate
  modified_base 18: mod_base = OTHER; note = cytidine-3'-phosphate
  modified_base 19: mod_base = OTHER; note = cytidine-3'-phosphate
  modified_base 20: mod_base = OTHER; note = 2'-deoxythymidine-3'-phosphorothioate
  misc_feature 1..19: note = RNA
  misc_feature 20..21: note = DNA
gtctaggagatacacctcctt

SEQ ID NO: 227 - DNA, 21 bp, synthetic construct
  source 1..21: mol_type = other DNA
  modified_base 1: mod_base = OTHER; note = guanosine-3'-phosphate
  modified_base 2: mod_base = OTHER; note = guanosine-3'-phosphate
  modified_base 3: mod_base = OTHER; note = adenosine-3'-phosphate
  modified_base 4: mod_base = OTHER; note = guanosine-3'-phosphate
  modified_base 5: mod_base = OTHER; note = guanosine-3'-phosphate
  modified_base 6: mod_base = OTHER; note = 2'-O-methyluridine-3'-phosphate
  modified_base 7: mod_base = OTHER; note = guanosine-3'-phosphate
  modified_base 8: mod_base = OTHER; note = 2'-O-methyluridine-3'-phosphate
  modified_base 9: mod_base = OTHER; note = adenosine-3'-phosphate
  modified_base 10: mod_base = OTHER; note = 2'-O-methyluridine-3'-phosphate
  modified_base 11: mod_base = OTHER; note = 2'-O-methylcytidine-3'-phosphate
  modified_base 12: mod_base = OTHER; note = 2'-O-methyluridine-3'-phosphate
  modified_base 13: mod_base = OTHER; note = 2'-O-methylcytidine-3'-phosphate
  modified_base 14: mod_base = OTHER; note = 2'-O-methylcytidine-3'-phosphate
  modified_base 15: mod_base = OTHER; note = 2'-O-methyluridine-3'-phosphate
  modified_base 16: mod_base = OTHER; note = adenosine-3'-phosphate
  modified_base 17: mod_base = OTHER; note = guanosine-3'-phosphate
  modified_base 18: mod_base = OTHER; note = adenosine-3'-phosphate
  modified_base 19: mod_base = OTHER; note = 2'-O-methylcytidine-3'-phosphate
  modified_base 20: mod_base = OTHER; note = 2'-deoxythymidine-3'-phosphorothioate
  misc_feature 1..19: note = RNA
  misc_feature 20..21: note = DNA
ggaggtgtatctcctagactt

SEQ ID NO: 228 - DNA, 21 bp, synthetic construct
  source 1..21: mol_type = other DNA
  modified_base 1: mod_base = OTHER; note = guanosine-3'-phosphate
  modified_base 2: mod_base = OTHER; note = uridine-3'-phosphate
  modified_base 3: mod_base = OTHER; note = cytidine-3'-phosphate
  modified_base 4: mod_base = OTHER; note = 2'-O-methyluridine-3'-phosphate
  modified_base 5: mod_base = OTHER; note = adenosine-3'-phosphate
  modified_base 6: mod_base = OTHER; note = guanosine-3'-phosphate
  modified_base 7: mod_base = OTHER; note = guanosine-3'-phosphate
  modified_base 8: mod_base = OTHER; note = adenosine-3'-phosphate
  modified_base 9: mod_base = OTHER; note = guanosine-3'-phosphate
  modified_base 10: mod_base = OTHER; note = adenosine-3'-phosphate
  modified_base 11: mod_base = OTHER; note = 2'-O-methyluridine-3'-phosphate
  modified_base 12: mod_base = OTHER; note = adenosine-3'-phosphate
  modified_base 13: mod_base = OTHER; note = 2'-O-methylcytidine-3'-phosphate
  modified_base 14: mod_base = OTHER; note = adenosine-3'-phosphate
  modified_base 15: mod_base = OTHER; note = cytidine-3'-phosphate
  modified_base 16: mod_base = OTHER; note = cytidine-3'-phosphate
  modified_base 17: mod_base = OTHER; note = uridine-3'-phosphate
  modified_base 18: mod_base = OTHER; note = cytidine-3'-phosphate
  modified_base 19: mod_base = OTHER; note = cytidine-3'-phosphate
  modified_base 20: mod_base = OTHER; note = 2'-deoxythymidine-3'-phosphorothioate
  misc_feature 1..19: note = RNA
  misc_feature 20..21: note = DNA
gtctaggagatacacctcctt

SEQ ID NO: 229 - DNA, 21 bp, synthetic construct
  source 1..21: mol_type = other DNA
  modified_base 1: mod_base = OTHER; note = adenosine-3'-phosphate
  modified_base 2: mod_base = OTHER; note = guanosine-3'-phosphate
  modified_base 3: mod_base = OTHER; note = guanosine-3'-phosphate
  modified_base 4: mod_base = OTHER; note = uridine-3'-phosphate
  modified_base 5: mod_base = OTHER; note = guanosine-3'-phosphate
  modified_base 6: mod_base = OTHER; note = uridine-3'-phosphate
  modified_base 7: mod_base = OTHER; note = adenosine-3'-phosphate
  modified_base 8: mod_base = OTHER; note = uridine-3'-phosphate
  modified_base 9: mod_base = OTHER; note = cytidine-3'-phosphate
  modified_base 10: mod_base = OTHER; note = uridine-3'-phosphate
  modified_base 11: mod_base = OTHER; note = cytidine-3'-phosphate
  modified_base 12: mod_base = OTHER; note = cytidine-3'-phosphate
  modified_base 13: mod_base = OTHER; note = uridine-3'-phosphate
  modified_base 14: mod_base = OTHER; note = adenosine-3'-phosphate
  modified_base 15: mod_base = OTHER; note = guanosine-3'-phosphate
  modified_base 16: mod_base = OTHER; note = adenosine-3'-phosphate
  modified_base 17: mod_base = OTHER; note = cytidine-3'-phosphate
  modified_base 18: mod_base = OTHER; note = adenosine-3'-phosphate
  modified_base 19: mod_base = OTHER; note = cytidine-3'-phosphate
  modified_base 20: mod_base = OTHER; note = 2'-deoxythymidine-3'-phosphorothioate
  misc_feature 1..19: note = RNA
  misc_feature 20..21: note = DNA
aggtgtatctcctagacactt

SEQ ID NO: 230 - DNA, 21 bp, synthetic construct
  source 1..21: mol_type = other DNA
  modified_base 1: mod_base = OTHER; note = guanosine-3'-phosphate
  modified_base 2: mod_base = OTHER; note = uridine-3'-phosphate
  modified_base 3: mod_base = OTHER; note = guanosine-3'-phosphate
  modified_base 4: mod_base = OTHER; note = uridine-3'-phosphate
  modified_base 5: mod_base = OTHER; note = cytidine-3'-phosphate
  modified_base 6: mod_base = OTHER; note = uridine-3'-phosphate
  modified_base 7: mod_base = OTHER; note = adenosine-3'-phosphate
  modified_base 8: mod_base = OTHER; note = guanosine-3'-phosphate
  modified_base 9: mod_base = OTHER; note = guanosine-3'-phosphate
  modified_base 10: mod_base = OTHER; note = adenosine-3'-phosphate
  modified_base 11: mod_base = OTHER; note = guanosine-3'-phosphate
  modified_base 12: mod_base = OTHER; note = adenosine-3'-phosphate
  modified_base 13: mod_base = OTHER; note = uridine-3'-phosphate
  modified_base 14: mod_base = OTHER; note = adenosine-3'-phosphate
  modified_base 15: mod_base = OTHER; note = cytidine-3'-phosphate
  modified_base 16: mod_base = OTHER; note = adenosine-3'-phosphate
  modified_base 17: mod_base = OTHER; note = cytidine-3'-phosphate
  modified_base 18: mod_base = OTHER; note = cytidine-3'-phosphate
  modified_base 19: mod_base = OTHER; note = uridine-3'-phosphate
  modified_base 20: mod_base = OTHER; note = 2'-deoxythymidine-3'-phosphorothioate
  misc_feature 1..19: note = RNA
  misc_feature 20..21: note = DNA
gtgtctaggagatacaccttt

SEQ ID NO: 231 - DNA, 21 bp, synthetic construct
  source 1..21: mol_type = other DNA
  modified_base 1: mod_base = OTHER; note = adenosine-3'-phosphate
  modified_base 2: mod_base = OTHER; note = guanosine-3'-phosphate
  modified_base 3: mod_base = OTHER; note = guanosine-3'-phosphate
  modified_base 4: mod_base = OTHER; note = 2'-O-methyluridine-3'-phosphate
  modified_base 5: mod_base = OTHER; note = guanosine-3'-phosphate
  modified_base 6: mod_base = OTHER; note = 2'-O-methyluridine-3'-phosphate
  modified_base 7: mod_base = OTHER; note = adenosine-3'-phosphate
  modified_base 8: mod_base = OTHER; note = 2'-O-methyluridine-3'-phosphate
  modified_base 9: mod_base = OTHER; note = 2'-O-methylcytidine-3'-phosphate
  modified_base 10: mod_base = OTHER; note = 2'-O-methyluridine-3'-phosphate
  modified_base 11: mod_base = OTHER; note = 2'-O-methylcytidine-3'-phosphate
  modified_base 12: mod_base = OTHER; note = 2'-O-methylcytidine-3'-phosphate
  modified_base 13: mod_base = OTHER; note = 2'-O-methyluridine-3'-phosphate
  modified_base 14: mod_base = OTHER; note = adenosine-3'-phosphate
  modified_base 15: mod_base = OTHER; note = guanosine-3'-phosphate
  modified_base 16: mod_base = OTHER; note = adenosine-3'-phosphate
  modified_base 17: mod_base = OTHER; note = 2'-O-methylcytidine-3'-phosphate
  modified_base 18: mod_base = OTHER; note = adenosine-3'-phosphate
  modified_base 19: mod_base = OTHER; note = 2'-O-methylcytidine-3'-phosphate
  modified_base 20: mod_base = OTHER; note = 2'-deoxythymidine-3'-phosphorothioate
  misc_feature 1..19: note = RNA
  misc_feature 20..21: note = DNA
aggtgtatctcctagacactt

SEQ ID NO: 232 - DNA, 21 bp, synthetic construct
  source 1..21: mol_type = other DNA
  modified_base 1: mod_base = OTHER; note = guanosine-3'-phosphate
  modified_base 2: mod_base = OTHER; note = uridine-3'-phosphate
  modified_base 3: mod_base = OTHER; note = guanosine-3'-phosphate
  modified_base 4: mod_base = OTHER; note = uridine-3'-phosphate
  modified_base 5: mod_base = OTHER; note = cytidine-3'-phosphate
  modified_base 6: mod_base = OTHER; note = 2'-O-methyluridine-3'-phosphate
  modified_base 7: mod_base = OTHER; note = adenosine-3'-phosphate
  modified_base 8: mod_base = OTHER; note = guanosine-3'-phosphate
  modified_base 9: mod_base = OTHER; note = guanosine-3'-phosphate
  modified_base 10: mod_base = OTHER; note = adenosine-3'-phosphate
  modified_base 11: mod_base = OTHER; note = guanosine-3'-phosphate
  modified_base 12: mod_base = OTHER; note = adenosine-3'-phosphate
  modified_base 13: mod_base = OTHER; note = 2'-O-methyluridine-3'-phosphate
  modified_base 14: mod_base = OTHER; note = adenosine-3'-phosphate
  modified_base 15: mod_base = OTHER; note = 2'-O-methylcytidine-3'-phosphate
  modified_base 16: mod_base = OTHER; note = adenosine-3'-phosphate
  modified_base 17: mod_base = OTHER; note = cytidine-3'-phosphate
  modified_base 18: mod_base = OTHER; note = cytidine-3'-phosphate
  modified_base 19: mod_base = OTHER; note = uridine-3'-phosphate
  modified_base 20: mod_base = OTHER; note = 2'-deoxythymidine-3'-phosphorothioate
  misc_feature 1..19: note = RNA
  misc_feature 20..21: note = DNA
gtgtctaggagatacaccttt

SEQ ID NO: 233 - DNA, 21 bp, synthetic construct
  source 1..21: mol_type = other DNA
  modified_base 1: mod_base = OTHER; note = 2'-deoxy-2'-fluoroadenosine-3'-phosphate
  modified_base 2: mod_base = OTHER; note = 2'-O-methylguanosine-3'-phosphate
  modified_base 3: mod_base = OTHER; note = 2'-deoxy-2'-fluoroguanosine-3'-phosphate
  modified_base 4: mod_base = OTHER; note = 2'-O-methyluridine-3'-phosphate
  modified_base 5: mod_base = OTHER; note = 2'-deoxy-2'-fluoroguanosine-3'-phosphate
  modified_base 6: mod_base = OTHER; note = 2'-O-methyluridine-3'-phosphate
  modified_base 7: mod_base = OTHER; note = 2'-deoxy-2'-fluoroadenosine-3'-phosphate
  modified_base 8: mod_base = OTHER; note = 2'-O-methyluridine-3'-phosphate
  modified_base 9: mod_base = OTHER; note = 2'-deoxy-2'-fluorocytidine-3'-phosphate
  modified_base 10: mod_base = OTHER; note = 2'-O-methyluridine-3'-phosphate
  modified_base 11: mod_base = OTHER; note = 2'-deoxy-2'-fluorocytidine-3'-phosphate
  modified_base 12: mod_base = OTHER; note = 2'-O-methylcytidine-3'-phosphate
  modified_base 13: mod_base = OTHER; note = 2'-deoxy-2'-fluorouridine-3'-phosphate
  modified_base 14: mod_base = OTHER; note = 2'-O-methyladenosine-3'-phosphate
  modified_base 15: mod_base = OTHER; note = 2'-deoxy-2'-fluoroguanosine-3'-phosphate
  modified_base 16: mod_base = OTHER; note = 2'-O-methyladenosine-3'-phosphate
  modified_base 17: mod_base = OTHER; note = 2'-deoxy-2'-fluorocytidine-3'-phosphate
  modified_base 18: mod_base = OTHER; note = 2'-O-methyladenosine-3'-phosphate
  modified_base 19: mod_base = OTHER; note = 2'-deoxy-2'-fluorocytidine-3'-phosphate
  modified_base 20: mod_base = OTHER; note = 2'-deoxythymidine-3'-phosphorothioate
  misc_feature 1..19: note = RNA
  misc_feature 20..21: note = DNA
aggtgtatctcctagacactt

SEQ ID NO: 234 - DNA, 21 bp, synthetic construct
  source 1..21: mol_type = other DNA
  modified_base 1: mod_base = OTHER; note = 2'-O-methylguanosine-3'-phosphate 5'phosphate
  modified_base 2: mod_base = OTHER; note = 2'-deoxy-2'-fluorouridine-3'-phosphate
  modified_base 3: mod_base = OTHER; note = 2'-O-methylguanosine-3'-phosphate
  modified_base 4: mod_base = OTHER; note = 2'-deoxy-2'-fluorouridine-3'-phosphate
  modified_base 5: mod_base = OTHER; note = 2'-O-methylcytidine-3'-phosphate
  modified_base 6: mod_base = OTHER; note = 2'-deoxy-2'-fluorouridine-3'-phosphate
  modified_base 7: mod_base = OTHER; note = 2'-O-methyladenosine-3'-phosphate
  modified_base 8: mod_base = OTHER; note = 2'-deoxy-2'-fluoroguanosine-3'-phosphate
  modified_base 9: mod_base = OTHER; note = 2'-O-methylguanosine-3'-phosphate
  modified_base 10: mod_base = OTHER; note = 2'-deoxy-2'-fluoroadenosine-3'-phosphate
  modified_base 11: mod_base = OTHER; note = 2'-O-methylguanosine-3'-phosphate
  modified_base 12: mod_base = OTHER; note = 2'-deoxy-2'-fluoroadenosine-3'-phosphate
  modified_base 13: mod_base = OTHER; note = 2'-O-methyluridine-3'-phosphate
  modified_base 14: mod_base = OTHER; note = 2'-deoxy-2'-fluoroadenosine-3'-phosphate
  modified_base 15: mod_base = OTHER; note = 2'-O-methylcytidine-3'-phosphate
  modified_base 16: mod_base = OTHER; note = 2'-deoxy-2'-fluoroadenosine-3'-phosphate
  modified_base 17: mod_base = OTHER; note = 2'-O-methylcytidine-3'-phosphate
  modified_base 18: mod_base = OTHER; note = 2'-deoxy-2'-fluorocytidine-3'-phosphate
  modified_base 19: mod_base = OTHER; note = 2'-O-methyluridine-3'-phosphate
  modified_base 20: mod_base = OTHER; note = 2'-deoxythymidine-3'-phosphorothioate
  misc_feature 1..19: note = RNA
  misc_feature 20..21: note = DNA
gtgtctaggagatacaccttt

SEQ ID NO: 235 - DNA, 21 bp, synthetic construct
  source 1..21: mol_type = other DNA
  modified_base 1: mod_base = OTHER; note = adenosine-3'-phosphate
  modified_base 2: mod_base = OTHER; note = guanosine-3'-phosphate
  modified_base 3: mod_base = OTHER; note = guanosine-3'-phosphate
  modified_base 4: mod_base = OTHER; note = 2'-deoxy-2'-fluorouridine-3'-phosphate
  modified_base 5: mod_base = OTHER; note = guanosine-3'-phosphate
  modified_base 6: mod_base = OTHER; note = 2'-deoxy-2'-fluorouridine-3'-phosphate
  modified_base 7: mod_base = OTHER; note = adenosine-3'-phosphate
  modified_base 8: mod_base = OTHER; note = 2'-deoxy-2'-fluorouridine-3'-phosphate
  modified_base 9: mod_base = OTHER; note = 2'-deoxy-2'-fluorocytidine-3'-phosphate
  modified_base 10: mod_base = OTHER; note = 2'-deoxy-2'-fluorouridine-3'-phosphate
  modified_base 11: mod_base = OTHER; note = 2'-deoxy-2'-fluorocytidine-3'-phosphate
  modified_base 12: mod_base = OTHER; note = 2'-deoxy-2'-fluorocytidine-3'-phosphate
  modified_base 13: mod_base = OTHER; note = 2'-deoxy-2'-fluorouridine-3'-phosphate
  modified_base 14: mod_base = OTHER; note = adenosine-3'-phosphate
  modified_base 15: mod_base = OTHER; note = guanosine-3'-phosphate
  modified_base 16: mod_base = OTHER; note = adenosine-3'-phosphate
  modified_base 17: mod_base = OTHER; note = 2'-deoxy-2'-fluorocytidine-3'-phosphate
  modified_base 18: mod_base = OTHER; note = adenosine-3'-phosphate
  modified_base 19: mod_base = OTHER; note = 2'-deoxy-2'-fluorocytidine-3'-phosphate
  modified_base 20: mod_base = OTHER; note = 2'-deoxythymidine-3'-phosphorothioate
  misc_feature 1..19: note = RNA
  misc_feature 20..21: note = DNA
aggtgtatctcctagacactt

SEQ ID NO: 236 - DNA, 21 bp, synthetic construct
  source 1..21: mol_type = other DNA
  modified_base 1: mod_base = OTHER; note = guanosine-3'-phosphate
  modified_base 2: mod_base = OTHER; note = 2'-deoxy-2'-fluorouridine-3'-phosphate
  modified_base 3: mod_base = OTHER; note = guanosine-3'-phosphate
  modified_base 4: mod_base = OTHER; note = 2'-deoxy-2'-fluorouridine-3'-phosphate
  modified_base 5: mod_base = OTHER; note = 2'-deoxy-2'-fluorocytidine-3'-phosphate
  modified_base 6: mod_base = OTHER; note = 2'-deoxy-2'-fluorouridine-3'-phosphate
  modified_base 7: mod_base = OTHER; note = adenosine-3'-phosphate
  modified_base 8: mod_base = OTHER; note = guanosine-3'-phosphate
  modified_base 9: mod_base = OTHER; note = guanosine-3'-phosphate
  modified_base 10: mod_base = OTHER; note = adenosine-3'-phosphate
  modified_base 11: mod_base = OTHER; note = guanosine-3'-phosphate
  modified_base 12: mod_base = OTHER; note = adenosine-3'-phosphate
  modified_base 13: mod_base = OTHER; note = 2'-deoxy-2'-fluorouridine-3'-phosphate
  modified_base 14: mod_base = OTHER; note = adenosine-3'-phosphate
  modified_base 15: mod_base = OTHER; note = 2'-deoxy-2'-fluorocytidine-3'-phosphate
  modified_base 16: mod_base = OTHER; note = adenosine-3'-phosphate
  modified_base 17: mod_base = OTHER; note = 2'-deoxy-2'-fluorocytidine-3'-phosphate
  modified_base 18: mod_base = OTHER; note = 2'-deoxy-2'-fluorocytidine-3'-phosphate
  modified_base 19: mod_base = OTHER; note = 2'-deoxy-2'-fluorouridine-3'-phosphate
  modified_base 20: mod_base = OTHER; note = 2'-deoxythymidine-3'-phosphorothioate
  misc_feature 1..19: note = RNA
  misc_feature 20..21: note = DNA
gtgtctaggagatacaccttt

SEQ ID NO: 237 - DNA, 21 bp, synthetic construct
  source 1..21: mol_type = other DNA
  modified_base 1: mod_base = OTHER; note = adenosine-3'-phosphate
  modified_base 2: mod_base = OTHER; note = 2'-O-methylguanosine-3'-phosphate
  modified_base 3: mod_base = OTHER; note = guanosine-3'-phosphate
  modified_base 4: mod_base = OTHER; note = 2'-O-methyluridine-3'-phosphate
  modified_base 5: mod_base = OTHER; note = guanosine-3'-phosphate
  modified_base 6: mod_base = OTHER; note = 2'-O-methyluridine-3'-phosphate
  modified_base 7: mod_base = OTHER; note = adenosine-3'-phosphate
  modified_base 8: mod_base = OTHER; note = 2'-O-methyluridine-3'-phosphate
  modified_base 9: mod_base = OTHER; note = cytidine-3'-phosphate
  modified_base 10: mod_base = OTHER; note = 2'-O-methyluridine-3'-phosphate
  modified_base 11: mod_base = OTHER; note = cytidine-3'-phosphate
  modified_base 12: mod_base = OTHER; note = 2'-O-methylcytidine-3'-phosphate
  modified_base 13: mod_base = OTHER; note = uridine-3'-phosphate
  modified_base 14: mod_base = OTHER; note = 2'-O-methyladenosine-3'-phosphate
  modified_base 15: mod_base = OTHER; note = guanosine-3'-phosphate
  modified_base 16: mod_base = OTHER; note = 2'-O-methyladenosine-3'-phosphate
  modified_base 17: mod_base = OTHER; note = cytidine-3'-phosphate
  modified_base 18: mod_base = OTHER; note = 2'-O-methyladenosine-3'-phosphate
  modified_base 19: mod_base = OTHER; note = cytidine-3'-phosphate
  modified_base 20: mod_base = OTHER; note = 2'-deoxythymidine-3'-phosphorothioate
  misc_feature 1..19: note = RNA
  misc_feature 20..21: note = DNA
aggtgtatctcctagacactt

SEQ ID NO: 238 - DNA, 21 bp, synthetic construct
  source 1..21: mol_type = other DNA
  modified_base 1: mod_base = OTHER; note = 2'-O-methylguanosine-3'-phosphate 5'phosphate
  modified_base 2: mod_base = OTHER; note = 2'-deoxy-2'-fluorouridine-3'-phosphate
  modified_base 3: mod_base = OTHER; note = 2'-O-methylguanosine-3'-phosphate
  modified_base 4: mod_base = OTHER; note = 2'-deoxy-2'-fluorouridine-3'-phosphate
  modified_base 5: mod_base = OTHER; note = 2'-O-methylcytidine-3'-phosphate
  modified_base 6: mod_base = OTHER; note = 2'-deoxy-2'-fluorouridine-3'-phosphate
  modified_base 7: mod_base = OTHER; note = 2'-O-methyladenosine-3'-phosphate
  modified_base 8: mod_base = OTHER; note = 2'-deoxy-2'-fluoroguanosine-3'-phosphate
  modified_base 9: mod_base = OTHER; note = 2'-O-methylguanosine-3'-phosphate
  modified_base 10: mod_base = OTHER; note = 2'-deoxy-2'-fluoroadenosine-3'-phosphate
  modified_base 11: mod_base = OTHER; note = 2'-O-methylguanosine-3'-phosphate
  modified_base 12: mod_base = OTHER; note = 2'-deoxy-2'-fluoroadenosine-3'-phosphate
  modified_base 13: mod_base = OTHER; note = 2'-O-methyluridine-3'-phosphate
  modified_base 14: mod_base = OTHER; note = 2'-deoxy-2'-fluoroadenosine-3'-phosphate
  modified_base 15: mod_base = OTHER; note = 2'-O-methylcytidine-3'-phosphate
  modified_base 16: mod_base = OTHER; note = 2'-deoxy-2'-fluoroadenosine-3'-phosphate
  modified_base 17: mod_base = OTHER; note = 2'-O-methylcytidine-3'-phosphate
  modified_base 18: mod_base = OTHER; note = 2'-deoxy-2'-fluorocytidine-3'-phosphate
  modified_base 19: mod_base = OTHER; note = 2'-O-methyluridine-3'-phosphate
  modified_base 20: mod_base = OTHER; note = 2'-deoxythymidine-3'-phosphorothioate
  misc_feature 1..19: note = RNA
  misc_feature 20..21: note = DNA
gtgtctaggagatacaccttt

SEQ ID NO: 239 - DNA, 21 bp, synthetic construct
  source 1..21: mol_type = other DNA
  modified_base 1: mod_base = OTHER; note = adenosine-3'-phosphate
  modified_base 2: mod_base = OTHER; note = 2'-O-methylguanosine-3'-phosphate
  modified_base 3: mod_base = OTHER; note = guanosine-3'-phosphate
  modified_base 4: mod_base = OTHER; note = 2'-O-methyluridine-3'-phosphate
  modified_base 5: mod_base = OTHER; note = guanosine-3'-phosphate
  modified_base 6: mod_base = OTHER; note = 2'-O-methyluridine-3'-phosphate
  modified_base 7: mod_base = OTHER; note = adenosine-3'-phosphate
  modified_base 8: mod_base = OTHER; note = 2'-O-methyluridine-3'-phosphate
  modified_base 9: mod_base = OTHER; note = cytidine-3'-phosphate
  modified_base 10: mod_base = OTHER; note = 2'-O-methyluridine-3'-phosphate
  modified_base 11: mod_base = OTHER; note = cytidine-3'-phosphate
  modified_base 12: mod_base = OTHER; note = 2'-O-methylcytidine-3'-phosphate
  modified_base 13: mod_base = OTHER; note = uridine-3'-phosphate
  modified_base 14: mod_base = OTHER; note = 2'-O-methyladenosine-3'-phosphate
  modified_base 15: mod_base = OTHER; note = guanosine-3'-phosphate
  modified_base 16: mod_base = OTHER; note = 2'-O-methyladenosine-3'-phosphate
  modified_base 17: mod_base = OTHER; note = cytidine-3'-phosphate
  modified_base 18: mod_base = OTHER; note = 2'-O-methyladenosine-3'-phosphate
  modified_base 19: mod_base = OTHER; note = cytidine-3'-phosphate
  modified_base 20: mod_base = OTHER; note = 2'-deoxythymidine-3'-phosphorothioate
  misc_feature 1..19: note = RNA
  misc_feature 20..21: note = DNA
aggtgtatctcctagacactt

SEQ ID NO: 240 - DNA, 21 bp, synthetic construct
  source 1..21: mol_type = other DNA
  modified_base 1: mod_base = OTHER; note = guanosine-3'-phosphate
  modified_base 2: mod_base = OTHER; note = 2'-deoxy-2'-fluorouridine-3'-phosphate
  modified_base 3: mod_base = OTHER; note = guanosine-3'-phosphate
  modified_base 4: mod_base = OTHER; note = 2'-deoxy-2'-fluorouridine-3'-phosphate
  modified_base 5: mod_base = OTHER; note = 2'-deoxy-2'-fluorocytidine-3'-phosphate
  modified_base 6: mod_base = OTHER; note = 2'-deoxy-2'-fluorouridine-3'-phosphate
  modified_base 7: mod_base = OTHER; note = adenosine-3'-phosphate
  modified_base 8: mod_base = OTHER; note = guanosine-3'-phosphate
  modified_base 9: mod_base = OTHER; note = guanosine-3'-phosphate
  modified_base 10: mod_base = OTHER; note = adenosine-3'-phosphate
  modified_base 11: mod_base = OTHER; note = guanosine-3'-phosphate
  modified_base 12: mod_base = OTHER; note = adenosine-3'-phosphate
  modified_base 13: mod_base = OTHER; note = 2'-deoxy-2'-fluorouridine-3'-phosphate
  modified_base 14: mod_base = OTHER; note = adenosine-3'-phosphate
  modified_base 15: mod_base = OTHER; note = 2'-deoxy-2'-fluorocytidine-3'-phosphate
  modified_base 16: mod_base = OTHER; note = adenosine-3'-phosphate
  modified_base 17: mod_base = OTHER; note = 2'-deoxy-2'-fluorocytidine-3'-phosphate
  modified_base 18: mod_base = OTHER; note = 2'-deoxy-2'-fluorocytidine-3'-phosphate
  modified_base 19: mod_base = OTHER; note = 2'-deoxy-2'-fluorouridine-3'-phosphate
  modified_base 20: mod_base = OTHER; note = 2'-deoxythymidine-3'-phosphorothioate
  misc_feature 1..19: note = RNA
  misc_feature 20..21: note = DNA
gtgtctaggagatacaccttt

SEQ ID NO: 241 - DNA, 21 bp, synthetic construct
  source 1..21: mol_type = other DNA
  modified_base 1: mod_base = OTHER; note = 2'-deoxy-2'-fluoroadenosine-3'-phosphate
  modified_base 2: mod_base = OTHER; note = 2'-O-methylguanosine-3'-phosphate
  modified_base 3: mod_base = OTHER; note = 2'-deoxy-2'-fluoroguanosine-3'-phosphate
  modified_base 4: mod_base = OTHER; note = 2'-O-methyluridine-3'-phosphate
  modified_base 5: mod_base = OTHER; note = 2'-deoxy-2'-fluoroguanosine-3'-phosphate
  modified_base 6: mod_base = OTHER; note = 2'-O-methyluridine-3'-phosphate
  modified_base 7: mod_base = OTHER; note = 2'-deoxy-2'-fluoroadenosine-3'-phosphate
  modified_base 8: mod_base = OTHER; note = 2'-O-methyluridine-3'-phosphate
  modified_base 9: mod_base = OTHER; note = 2'-deoxy-2'-fluorocytidine-3'-phosphate
  modified_base 10: mod_base = OTHER; note = 2'-O-methyluridine-3'-phosphate
  modified_base 11: mod_base = OTHER; note = 2'-deoxy-2'-fluorocytidine-3'-phosphate
  modified_base 12: mod_base = OTHER; note = 2'-O-methylcytidine-3'-phosphate
  modified_base 13: mod_base = OTHER; note = 2'-deoxy-2'-fluorouridine-3'-phosphate
  modified_base 14: mod_base = OTHER; note = 2'-O-methyladenosine-3'-phosphate
  modified_base 15: mod_base = OTHER; note = 2'-deoxy-2'-fluoroguanosine-3'-phosphate
  modified_base 16: mod_base = OTHER; note = 2'-O-methyladenosine-3'-phosphate
  modified_base 17: mod_base = OTHER; note = 2'-deoxy-2'-fluorocytidine-3'-phosphate
  modified_base 18: mod_base = OTHER; note = 2'-O-methyladenosine-3'-phosphate
  modified_base 19: mod_base = OTHER; note = 2'-deoxy-2'-fluorocytidine-3'-phosphate
  modified_base 20: mod_base = OTHER; note = 2'-deoxythymidine-3'-phosphorothioate
  misc_feature 1..19: note = RNA
  misc_feature 20..21: note = DNA
aggtgtatctcctagacactt

SEQ ID NO: 242 - DNA, 21 bp, synthetic construct
  source 1..21: mol_type = other DNA
  modified_base 1: mod_base = OTHER; note = guanosine-3'-phosphate
  modified_base 2: mod_base = OTHER; note = uridine-3'-phosphate
  modified_base 3: mod_base = OTHER; note = guanosine-3'-phosphate
  modified_base 4: mod_base = OTHER; note = uridine-3'-phosphate
  modified_base 5: mod_base = OTHER; note = cytidine-3'-phosphate
  modified_base 6: mod_base = OTHER; note = 2'-O-methyluridine-3'-phosphate
  modified_base 7: mod_base = OTHER; note = 2'-O-methyladenosine-3'-phosphate
  modified_base 8: mod_base = OTHER; note = guanosine-3'-phosphate
  modified_base 9: mod_base = OTHER; note = guanosine-3'-phosphate
  modified_base 10: mod_base = OTHER; note = 2'-O-methyladenosine-3'-phosphate
  modified_base 11: mod_base = OTHER; note = 2'-O-methylguanosine-3'-phosphate
  modified_base 12: mod_base = OTHER; note = adenosine-3'-phosphate
  modified_base 13: mod_base = OTHER; note = uridine-3'-phosphate
  modified_base 14: mod_base = OTHER; note = adenosine-3'-phosphate
  modified_base 15: mod_base = OTHER; note = cytidine-3'-phosphate
  modified_base 16: mod_base = OTHER; note = adenosine-3'-phosphate
  modified_base 17: mod_base = OTHER; note = 2'-O-methylcytidine-3'-phosphate
  modified_base 18: mod_base = OTHER; note = 2'-O-methylcytidine-3'-phosphate
  modified_base 19: mod_base = OTHER; note = 2'-O-methyluridine-3'-phosphate
  modified_base 20: mod_base = OTHER; note = 2'-deoxythymidine-3'-phosphorothioate
  misc_feature 1..19: note = RNA
  misc_feature 20..21: note = DNA
gtgtctaggagatacaccttt

SEQ ID NO: 243 - DNA, 21 bp, synthetic construct
  source 1..21: mol_type = other DNA
  modified_base 1: mod_base = OTHER; note = adenosine-3'-phosphate
  modified_base 2: mod_base = OTHER; note = guanosine-3'-phosphate
  modified_base 3: mod_base = OTHER; note = guanosine-3'-phosphate
  modified_base 4: mod_base = OTHER; note = 2'-deoxy-2'-fluorouridine-3'-phosphate
  modified_base 5: mod_base = OTHER; note = guanosine-3'-phosphate
  modified_base 6: mod_base = OTHER; note = 2'-deoxy-2'-fluorouridine-3'-phosphate
  modified_base 7: mod_base = OTHER; note = adenosine-3'-phosphate
  modified_base 8: mod_base = OTHER; note = 2'-deoxy-2'-fluorouridine-3'-phosphate
  modified_base 9: mod_base = OTHER; note = 2'-deoxy-2'-fluorocytidine-3'-phosphate
  modified_base 10: mod_base = OTHER; note = 2'-deoxy-2'-fluorouridine-3'-phosphate
  modified_base 11: mod_base = OTHER; note = 2'-deoxy-2'-fluorocytidine-3'-phosphate
  modified_base 12: mod_base = OTHER; note = 2'-deoxy-2'-fluorocytidine-3'-phosphate
  modified_base 13: mod_base = OTHER; note = 2'-deoxy-2'-fluorouridine-3'-phosphate
  modified_base 14: mod_base = OTHER; note = adenosine-3'-phosphate
  modified_base 15: mod_base = OTHER; note = guanosine-3'-phosphate
  modified_base 16: mod_base = OTHER; note = adenosine-3'-phosphate
  modified_base 17: mod_base = OTHER; note = 2'-deoxy-2'-fluorocytidine-3'-phosphate
  modified_base 18: mod_base = OTHER; note = adenosine-3'-phosphate
  modified_base 19: mod_base = OTHER; note = 2'-deoxy-2'-fluorocytidine-3'-phosphate
  modified_base 20: mod_base = OTHER; note = 2'-deoxythymidine-3'-phosphorothioate
  misc_feature 1..19: note = RNA
  misc_feature 20..21: note = DNA
aggtgtatctcctagacactt

SEQ ID NO: 244 - DNA, 21 bp, synthetic construct
  source 1..21: mol_type = other DNA
  modified_base 1: mod_base = OTHER; note = guanosine-3'-phosphate
  modified_base 2: mod_base = OTHER; note = uridine-3'-phosphate
  modified_base 3: mod_base = OTHER; note = guanosine-3'-phosphate
  modified_base 4: mod_base = OTHER; note = uridine-3'-phosphate
  modified_base 5: mod_base = OTHER; note = cytidine-3'-phosphate
  modified_base 6: mod_base = OTHER; note = 2'-O-methyluridine-3'-phosphate
  modified_base 7: mod_base = OTHER; note = 2'-O-methyladenosine-3'-phosphate
  modified_base 8: mod_base = OTHER; note = guanosine-3'-phosphate
  modified_base 9: mod_base = OTHER; note = guanosine-3'-phosphate
  modified_base 10: mod_base = OTHER; note = 2'-O-methyladenosine-3'-phosphate
  modified_base 11: mod_base = OTHER; note = 2'-O-methylguanosine-3'-phosphate
  modified_base 12: mod_base = OTHER; note = adenosine-3'-phosphate
  modified_base 13: mod_base = OTHER; note = uridine-3'-phosphate
  modified_base 14: mod_base = OTHER; note = adenosine-3'-phosphate
  modified_base 15: mod_base = OTHER; note = cytidine-3'-phosphate
  modified_base 16: mod_base = OTHER; note = adenosine-3'-phosphate
  modified_base 17: mod_base = OTHER; note = 2'-O-methylcytidine-3'-phosphate
  modified_base 18: mod_base = OTHER; note = 2'-O-methylcytidine-3'-phosphate
  modified_base 19: mod_base = OTHER; note = 2'-O-methyluridine-3'-phosphate
  modified_base 20: mod_base = OTHER; note = 2'-deoxythymidine-3'-phosphorothioate
  misc_feature 1..19: note = RNA
  misc_feature 20..21: note = DNA
gtgtctaggagatacaccttt

SEQ ID NO: 245 - DNA, 21 bp, synthetic construct
  source 1..21: mol_type = other DNA
  modified_base 1: mod_base = OTHER; note = adenosine-3'-phosphate
  modified_base 2: mod_base = OTHER; note = 2'-O-methylguanosine-3'-phosphate
  modified_base 3: mod_base = OTHER; note = guanosine-3'-phosphate
  modified_base 4: mod_base = OTHER; note = 2'-O-methyluridine-3'-phosphate
  modified_base 5: mod_base = OTHER; note = guanosine-3'-phosphate
  modified_base 6: mod_base = OTHER; note = 2'-O-methyluridine-3'-phosphate
  modified_base 7: mod_base = OTHER; note = adenosine-3'-phosphate
  modified_base 8: mod_base = OTHER; note = 2'-O-methyluridine-3'-phosphate
  modified_base 9: mod_base = OTHER; note = cytidine-3'-phosphate
  modified_base 10: mod_base = OTHER; note = 2'-O-methyluridine-3'-phosphate
  modified_base 11: mod_base = OTHER; note = cytidine-3'-phosphate
  modified_base 12: mod_base = OTHER; note = 2'-O-methylcytidine-3'-phosphate
  modified_base 13: mod_base = OTHER; note = uridine-3'-phosphate
  modified_base 14: mod_base = OTHER; note = 2'-O-methyladenosine-3'-phosphate
  modified_base 15: mod_base = OTHER; note = guanosine-3'-phosphate
  modified_base 16: mod_base = OTHER; note = 2'-O-methyladenosine-3'-phosphate
  modified_base 17: mod_base = OTHER; note = cytidine-3'-phosphate
  modified_base 18: mod_base = OTHER; note = 2'-O-methyladenosine-3'-phosphate
  modified_base 19: mod_base = OTHER; note = cytidine-3'-phosphate
  modified_base 20: mod_base = OTHER; note = 2'-deoxythymidine-3'-phosphorothioate
  misc_feature 1..19: note = RNA
  misc_feature 20..21: note = DNA
aggtgtatctcctagacactt

SEQ ID NO: 246 - DNA, 21 bp, synthetic construct
  source 1..21: mol_type = other DNA
  modified_base 1: mod_base = OTHER; note = guanosine-3'-phosphate
  modified_base 2: mod_base = OTHER; note = uridine-3'-phosphate
  modified_base 3: mod_base = OTHER; note = guanosine-3'-phosphate
  modified_base 4: mod_base = OTHER; note = uridine-3'-phosphate
  modified_base 5: mod_base = OTHER; note = cytidine-3'-phosphate
  modified_base 6: mod_base = OTHER; note = 2'-O-methyluridine-3'-phosphate
  modified_base 7: mod_base = OTHER; note = 2'-O-methyladenosine-3'-phosphate
  modified_base 8: mod_base = OTHER; note = guanosine-3'-phosphate
  modified_base 9: mod_base = OTHER; note = guanosine-3'-phosphate
  modified_base 10: mod_base = OTHER; note = 2'-O-methyladenosine-3'-phosphate
  modified_base 11: mod_base = OTHER; note = 2'-O-methylguanosine-3'-phosphate
  modified_base 12: mod_base = OTHER; note = adenosine-3'-phosphate
  modified_base 13: mod_base = OTHER; note = uridine-3'-phosphate
  modified_base 14: mod_base = OTHER; note = adenosine-3'-phosphate
  modified_base 15: mod_base = OTHER; note = cytidine-3'-phosphate
  modified_base 16: mod_base = OTHER; note = adenosine-3'-phosphate
  modified_base 17: mod_base = OTHER; note = 2'-O-methylcytidine-3'-phosphate
  modified_base 18: mod_base = OTHER; note = 2'-O-methylcytidine-3'-phosphate
  modified_base 19: mod_base = OTHER; note = 2'-O-methyluridine-3'-phosphate
  modified_base 20: mod_base = OTHER; note = 2'-deoxythymidine-3'-phosphorothioate
  misc_feature 1..19: note = RNA
  misc_feature 20..21: note = DNA
gtgtctaggagatacaccttt

SEQ ID NO: 247 - DNA, 21 bp, synthetic construct
  source 1..21: mol_type = other DNA
  modified_base 1: mod_base = OTHER; note = 2'-deoxy-2'-fluoroguanosine-3'-phosphate
  modified_base 2: mod_base = OTHER; note = 2'-O-methylcytidine-3'-phosphate
  modified_base 3: mod_base = OTHER; note = 2'-deoxy-2'-fluoroadenosine-3'-phosphate
  modified_base 4: mod_base = OTHER; note = 2'-O-methylcytidine-3'-phosphate
  modified_base 5: mod_base = OTHER; note = 2'-deoxy-2'-fluorocytidine-3'-phosphate
  modified_base 6: mod_base = OTHER; note = 2'-O-methylcytidine-3'-phosphate
  modified_base 7: mod_base = OTHER; note = 2'-deoxy-2'-fluorouridine-3'-phosphate
  modified_base 8: mod_base = OTHER; note = 2'-O-methylcytidine-3'-phosphate
  modified_base 9: mod_base = OTHER; note = 2'-deoxy-2'-fluoroadenosine-3'-phosphate
  modified_base 10: mod_base = OTHER; note = 2'-O-methyluridine-3'-phosphate
  modified_base 11: mod_base = OTHER; note = 2'-deoxy-2'-fluoroadenosine-3'-phosphate
  modified_base 12: mod_base = OTHER; note = 2'-O-methylguanosine-3'-phosphate
  modified_base 13: mod_base = OTHER; note = 2'-deoxy-2'-fluoroguanosine-3'-phosphate
  modified_base 14: mod_base = OTHER; note = 2'-O-methylcytidine-3'-phosphate
  modified_base 15: mod_base = OTHER; note = 2'-deoxy-2'-fluorocytidine-3'-phosphate
  modified_base 16: mod_base = OTHER; note = 2'-O-methyluridine-3'-phosphate
  modified_base 17: mod_base = OTHER; note = 2'-deoxy-2'-fluoroguanosine-3'-phosphate
  modified_base 18: mod_base = OTHER; note = 2'-O-methylguanosine-3'-phosphate
  modified_base 19: mod_base = OTHER; note = 2'-deoxy-2'-fluoroadenosine-3'-phosphate
  modified_base 20: mod_base = OTHER; note = 2'-deoxythymidine-3'-phosphorothioate
  misc_feature 1..19: note = RNA
  misc_feature 20..21: note = DNA
gcaccctcataggcctggatt

SEQ ID NO: 248 - DNA, 21 bp, synthetic construct
  source 1..21: mol_type = other DNA
  modified_base 1: mod_base = OTHER; note = 2'-O-methyluridine-3'-phosphate 5'phosphate
  modified_base 2: mod_base = OTHER; note = 2'-deoxy-2'-fluorocytidine-3'-phosphate
  modified_base 3: mod_base = OTHER; note = 2'-O-methylcytidine-3'-phosphate
  modified_base 4: mod_base = OTHER; note = 2'-deoxy-2'-fluoroadenosine-3'-phosphate
  modified_base 5: mod_base = OTHER; note = 2'-O-methylguanosine-3'-phosphate
  modified_base 6: mod_base = OTHER; note = 2'-deoxy-2'-fluoroguanosine-3'-phosphate
  modified_base 7: mod_base = OTHER; note = 2'-O-methylcytidine-3'-phosphate
  modified_base 8: mod_base = OTHER; note = 2'-deoxy-2'-fluorocytidine-3'-phosphate
  modified_base 9: mod_base = OTHER; note = 2'-O-methyluridine-3'-phosphate
  modified_base 10: mod_base = OTHER; note = 2'-deoxy-2'-fluoroadenosine-3'-phosphate
  modified_base 11: mod_base = OTHER; note = 2'-O-methyluridine-3'-phosphate
  modified_base 12: mod_base = OTHER; note = 2'-deoxy-2'-fluoroguanosine-3'-phosphate
  modified_base 13: mod_base = OTHER; note = 2'-O-methyladenosine-3'-phosphate
  modified_base 14: mod_base = OTHER; note = 2'-deoxy-2'-fluoroguanosine-3'-phosphate
  modified_base 15: mod_base = OTHER; note = 2'-O-methylguanosine-3'-phosphate
  modified_base 16: mod_base = OTHER; note = 2'-deoxy-2'-fluoroguanosine-3'-phosphate
  modified_base 17: mod_base = OTHER; note = 2'-O-methyluridine-3'-phosphate
  modified_base 18: mod_base = OTHER; note = 2'-deoxy-2'-fluoroguanosine-3'-phosphate
  modified_base 19: mod_base = OTHER; note = 2'-O-methylcytidine-3'-phosphate
  modified_base 20: mod_base = OTHER; note = 2'-deoxythymidine-3'-phosphorothioate
  misc_feature 1..19: note = RNA
  misc_feature 20..21: note = DNA
tccaggcctatgagggtgctt

SEQ ID NO: 249 - DNA, 21 bp, synthetic construct
  source 1..21: mol_type = other DNA
  modified_base 1: mod_base = OTHER; note = guanosine-3'-phosphate
  modified_base 2: mod_base = OTHER; note = 2'-deoxy-2'-fluorocytidine-3'-phosphate
  modified_base 3: mod_base = OTHER; note = adenosine-3'-phosphate
  modified_base 4: mod_base = OTHER; note = 2'-deoxy-2'-fluorocytidine-3'-phosphate
  modified_base 5: mod_base = OTHER; note = 2'-deoxy-2'-fluorocytidine-3'-phosphate
  modified_base 6: mod_base = OTHER; note = 2'-deoxy-2'-fluorocytidine-3'-phosphate
  modified_base 7: mod_base = OTHER; note = 2'-deoxy-2'-fluorouridine-3'-phosphate
  modified_base 8: mod_base = OTHER; note = 2'-deoxy-2'-fluorocytidine-3'-phosphate
  modified_base 9: mod_base = OTHER; note = adenosine-3'-phosphate
  modified_base 10: mod_base = OTHER; note = 2'-deoxy-2'-fluorouridine-3'-phosphate
  modified_base 11: mod_base = OTHER; note = adenosine-3'-phosphate
  modified_base 12: mod_base = OTHER; note = guanosine-3'-phosphate
  modified_base 13: mod_base = OTHER; note = guanosine-3'-phosphate
  modified_base 14: mod_base = OTHER; note = 2'-deoxy-2'-fluorocytidine-3'-phosphate
  modified_base 15: mod_base = OTHER; note = 2'-deoxy-2'-fluorocytidine-3'-phosphate
  modified_base 16: mod_base = OTHER; note = 2'-deoxy-2'-fluorouridine-3'-phosphate
  modified_base 17: mod_base = OTHER; note = guanosine-3'-phosphate
  modified_base 18: mod_base = OTHER; note = guanosine-3'-phosphate
  modified_base 19: mod_base = OTHER; note = adenosine-3'-phosphate
  modified_base 20: mod_base = OTHER; note = 2'-deoxythymidine-3'-phosphorothioate
  misc_feature 1..19: note = RNA
  misc_feature 20..21: note = DNA
gcaccctcataggcctggatt

SEQ ID NO: 250 - DNA, 21 bp, synthetic construct
  source 1..21: mol_type = other DNA
  modified_base 1: mod_base = OTHER; note = 2'-deoxy-2'-fluorouridine-3'-phosphate
  modified_base 2: mod_base = OTHER; note = 2'-deoxy-2'-fluorocytidine-3'-phosphate
  modified_base 3: mod_base = OTHER; note = 2'-deoxy-2'-fluorocytidine-3'-phosphate
  modified_base 4: mod_base = OTHER; note = adenosine-3'-phosphate
  modified_base 5: mod_base = OTHER; note = guanosine-3'-phosphate
  modified_base 6: mod_base = OTHER; note = guanosine-3'-phosphate
  modified_base 7: mod_base = OTHER; note = 2'-deoxy-2'-fluorocytidine-3'-phosphate
  modified_base 8: mod_base = OTHER; note = 2'-deoxy-2'-fluorocytidine-3'-phosphate
  modified_base 9: mod_base = OTHER; note = 2'-deoxy-2'-fluorouridine-3'-phosphate
  modified_base 10: mod_base = OTHER; note = adenosine-3'-phosphate
  modified_base 11: mod_base = OTHER; note = 2'-deoxy-2'-fluorouridine-3'-phosphate
  modified_base 12: mod_base = OTHER; note = guanosine-3'-phosphate
  modified_base 13: mod_base = OTHER; note = adenosine-3'-phosphate
  modified_base 14: mod_base = OTHER; note = guanosine-3'-phosphate
  modified_base 15: mod_base = OTHER; note = guanosine-3'-phosphate
  modified_base 16: mod_base = OTHER; note = guanosine-3'-phosphate
  modified_base 17: mod_base = OTHER; note = 2'-deoxy-2'-fluorouridine-3'-phosphate
  modified_base 18: mod_base = OTHER; note = guanosine-3'-phosphate
  modified_base 19: mod_base = OTHER; note = 2'-deoxy-2'-fluorocytidine-3'-phosphate
  modified_base 20: mod_base = OTHER; note = 2'-deoxythymidine-3'-phosphorothioate
  misc_feature 1..19: note = RNA
  misc_feature 20..21: note = DNA
tccaggcctatgagggtgctt

SEQ ID NO: 251 - DNA, 21 bp, synthetic construct
  source 1..21: mol_type = other DNA
  modified_base 1: mod_base = OTHER; note = guanosine-3'-phosphate
  modified_base 2: mod_base = OTHER; note = 2'-O-methylcytidine-3'-phosphate
  modified_base 3: mod_base = OTHER; note = adenosine-3'-phosphate
  modified_base 4: mod_base = OTHER; note = 2'-O-methylcytidine-3'-phosphate
  modified_base 5: mod_base = OTHER; note = cytidine-3'-phosphate
  modified_base 6: mod_base = OTHER; note = 2'-O-methylcytidine-3'-phosphate
  modified_base 7: mod_base = OTHER; note = uridine-3'-phosphate
  modified_base 8: mod_base = OTHER; note = 2'-O-methylcytidine-3'-phosphate
  modified_base 9: mod_base = OTHER; note = adenosine-3'-phosphate
  modified_base 10: mod_base = OTHER; note = 2'-O-methyluridine-3'-phosphate
  modified_base 11: mod_base = OTHER; note = adenosine-3'-phosphate
  modified_base 12: mod_base = OTHER; note = 2'-O-methylguanosine-3'-phosphate
  modified_base 13: mod_base = OTHER; note = guanosine-3'-phosphate
  modified_base 14: mod_base = OTHER; note = 2'-O-methylcytidine-3'-phosphate
  modified_base 15: mod_base = OTHER; note = cytidine-3'-phosphate
  modified_base 16: mod_base = OTHER; note = 2'-O-methyluridine-3'-phosphate
  modified_base 17: mod_base = OTHER; note = guanosine-3'-phosphate
  modified_base 18: mod_base = OTHER; note = 2'-O-methylguanosine-3'-phosphate
  modified_base 19: mod_base = OTHER; note = adenosine-3'-phosphate
  modified_base 20: mod_base = OTHER; note = 2'-deoxythymidine-3'-phosphorothioate
  misc_feature 1..19: note = RNA
  misc_feature 20..21: note = DNA
gcaccctcataggcctggatt

SEQ ID NO: 252 - DNA, 21 bp, synthetic construct
  source 1..21: mol_type = other DNA
  modified_base 1: mod_base = OTHER; note = 2'-O-methyluridine-3'-phosphate 5'phosphate
  modified_base 2: mod_base = OTHER; note = 2'-deoxy-2'-fluorocytidine-3'-phosphate
  modified_base 3: mod_base = OTHER; note = 2'-O-methylcytidine-3'-phosphate
  modified_base 4: mod_base = OTHER; note = 2'-deoxy-2'-fluoroadenosine-3'-phosphate
  modified_base 5: mod_base = OTHER; note = 2'-O-methylguanosine-3'-phosphate
  modified_base 6: mod_base = OTHER; note = 2'-deoxy-2'-fluoroguanosine-3'-phosphate
  modified_base 7: mod_base = OTHER; note = 2'-O-methylcytidine-3'-phosphate
  modified_base 8: mod_base = OTHER; note = 2'-deoxy-2'-fluorocytidine-3'-phosphate
  modified_base 9: mod_base = OTHER; note = 2'-O-methyluridine-3'-phosphate
  modified_base 10: mod_base = OTHER; note = 2'-deoxy-2'-fluoroadenosine-3'-phosphate
  modified_base 11: mod_base = OTHER; note = 2'-O-methyluridine-3'-phosphate
  modified_base 12: mod_base = OTHER; note = 2'-deoxy-2'-fluoroguanosine-3'-phosphate
  modified_base 13: mod_base = OTHER; note = 2'-O-methyladenosine-3'-phosphate
  modified_base 14: mod_base = OTHER; note = 2'-deoxy-2'-fluoroguanosine-3'-phosphate
  modified_base 15: mod_base = OTHER; note = 2'-O-methylguanosine-3'-phosphate
  modified_base 16: mod_base = OTHER; note = 2'-deoxy-2'-fluoroguanosine-3'-phosphate
  modified_base 17: mod_base = OTHER; note = 2'-O-methyluridine-3'-phosphate
  modified_base 18: mod_base = OTHER; note = 2'-deoxy-2'-fluoroguanosine-3'-phosphate
  modified_base 19: mod_base = OTHER; note = 2'-O-methylcytidine-3'-phosphate
  modified_base 20: mod_base = OTHER; note = 2'-deoxythymidine-3'-phosphorothioate
  misc_feature 1..19: note = RNA
  misc_feature 20..21: note = DNA
tccaggcctatgagggtgctt

SEQ ID NO: 253 - DNA, 21 bp, synthetic construct
  source 1..21: mol_type = other DNA
  modified_base 1: mod_base = OTHER; note = guanosine-3'-phosphate
  modified_base 2: mod_base = OTHER; note = 2'-O-methylcytidine-3'-phosphate
  modified_base 3: mod_base = OTHER; note = adenosine-3'-phosphate
  modified_base 4: mod_base = OTHER; note = 2'-O-methylcytidine-3'-phosphate
  modified_base 5: mod_base = OTHER; note = cytidine-3'-phosphate
  modified_base 6: mod_base = OTHER; note = 2'-O-methylcytidine-3'-phosphate
  modified_base 7: mod_base = OTHER; note = uridine-3'-phosphate
  modified_base 8: mod_base = OTHER; note = 2'-O-methylcytidine-3'-phosphate
  modified_base 9: mod_base = OTHER; note = adenosine-3'-phosphate
  modified_base 10: mod_base = OTHER; note = 2'-O-methyluridine-3'-phosphate
  modified_base 11: mod_base = OTHER; note = adenosine-3'-phosphate
  modified_base 12: mod_base = OTHER; note = 2'-O-methylguanosine-3'-phosphate
  modified_base 13: mod_base = OTHER; note = guanosine-3'-phosphate
  modified_base 14: mod_base = OTHER; note = 2'-O-methylcytidine-3'-phosphate
  modified_base 15: mod_base = OTHER; note = cytidine-3'-phosphate
  modified_base 16: mod_base = OTHER; note = 2'-O-methyluridine-3'-phosphate
  modified_base 17: mod_base = OTHER; note = guanosine-3'-phosphate
  modified_base 18: mod_base = OTHER; note = 2'-O-methylguanosine-3'-phosphate
  modified_base 19: mod_base = OTHER; note = adenosine-3'-phosphate
  modified_base 20: mod_base = OTHER; note = 2'-deoxythymidine-3'-phosphorothioate
  misc_feature 1..19: note = RNA
  misc_feature 20..21: note = DNA
gcaccctcataggcctggatt

SEQ ID NO: 254 - DNA, 21 bp, synthetic construct
  source 1..21: mol_type = other DNA
  modified_base 1: mod_base = OTHER; note = 2'-deoxy-2'-fluorouridine-3'-phosphate
  modified_base 2: mod_base = OTHER; note = 2'-deoxy-2'-fluorocytidine-3'-phosphate
  modified_base 3: mod_base = OTHER; note = 2'-deoxy-2'-fluorocytidine-3'-phosphate
  modified_base 4: mod_base = OTHER; note = adenosine-3'-phosphate
  modified_base 5: mod_base = OTHER; note = guanosine-3'-phosphate
  modified_base 6: mod_base = OTHER; note = guanosine-3'-phosphate
  modified_base 7: mod_base = OTHER; note = 2'-deoxy-2'-fluorocytidine-3'-phosphate
  modified_base 8: mod_base = OTHER; note = 2'-deoxy-2'-fluorocytidine-3'-phosphate
  modified_base 9: mod_base = OTHER; note = 2'-deoxy-2'-fluorouridine-3'-phosphate
  modified_base 10: mod_base = OTHER; note = adenosine-3'-phosphate
  modified_base 11: mod_base = OTHER; note = 2'-deoxy-2'-fluorouridine-3'-phosphate
  modified_base 12: mod_base = OTHER; note = guanosine-3'-phosphate
  modified_base 13: mod_base = OTHER; note = adenosine-3'-phosphate
  modified_base 14: mod_base = OTHER; note = guanosine-3'-phosphate
  modified_base 15: mod_base = OTHER; note = guanosine-3'-phosphate
  modified_base 16: mod_base = OTHER; note = guanosine-3'-phosphate
  modified_base 17: mod_base = OTHER; note = 2'-deoxy-2'-fluorouridine-3'-phosphate
  modified_base 18: mod_base = OTHER; note = guanosine-3'-phosphate
  modified_base 19: mod_base = OTHER; note = 2'-deoxy-2'-fluorocytidine-3'-phosphate
  modified_base 20: mod_base = OTHER; note = 2'-deoxythymidine-3'-phosphorothioate
  misc_feature 1..19: note = RNA
  misc_feature 20..21: note = DNA
tccaggcctatgagggtgctt

SEQ ID NO: 255 - DNA, 21 bp, synthetic construct
  source 1..21: mol_type = other DNA
  modified_base 1: mod_base = OTHER; note = 2'-deoxy-2'-fluoroguanosine-3'-phosphate
  modified_base 2: mod_base = OTHER; note = 2'-O-methylcytidine-3'-phosphate
  modified_base 3: mod_base = OTHER; note = 2'-deoxy-2'-fluoroadenosine-3'-phosphate
  modified_base 4: mod_base = OTHER; note = 2'-O-methylcytidine-3'-phosphate
  modified_base 5: mod_base = OTHER; note = 2'-deoxy-2'-fluorocytidine-3'-phosphate
  modified_base 6: mod_base = OTHER; note = 2'-O-methylcytidine-3'-phosphate
  modified_base 7: mod_base = OTHER; note = 2'-deoxy-2'-fluorouridine-3'-phosphate
  modified_base 8: mod_base = OTHER; note = 2'-O-methylcytidine-3'-phosphate
  modified_base 9: mod_base = OTHER; note = 2'-deoxy-2'-fluoroadenosine-3'-phosphate
  modified_base 10: mod_base = OTHER; note = 2'-O-methyluridine-3'-phosphate
  modified_base 11: mod_base = OTHER; note = 2'-deoxy-2'-fluoroadenosine-3'-phosphate
  modified_base 12: mod_base = OTHER; note = 2'-O-methylguanosine-3'-phosphate
  modified_base 13: mod_base = OTHER; note = 2'-deoxy-2'-fluoroguanosine-3'-phosphate
  modified_base 14: mod_base = OTHER; note = 2'-O-methylcytidine-3'-phosphate
  modified_base 15: mod_base = OTHER; note = 2'-deoxy-2'-fluorocytidine-3'-phosphate
  modified_base 16: mod_base = OTHER; note = 2'-O-methyluridine-3'-phosphate
  modified_base 17: mod_base = OTHER; note = 2'-deoxy-2'-fluoroguanosine-3'-phosphate
  modified_base 18: mod_base = OTHER; note = 2'-O-methylguanosine-3'-phosphate
  modified_base 19: mod_base = OTHER; note = 2'-deoxy-2'-fluoroadenosine-3'-phosphate
  modified_base 20: mod_base = OTHER; note = 2'-deoxythymidine-3'-phosphorothioate
  misc_feature 1..19: note = RNA
  misc_feature 20..21: note = DNA
gcaccctcataggcctggatt

SEQ ID NO: 256 - DNA, 21 bp, synthetic construct
  source 1..21: mol_type = other DNA
  modified_base 1: mod_base = OTHER; note = uridine-3'-phosphate
  modified_base 2: mod_base = OTHER; note = cytidine-3'-phosphate
  modified_base 3: mod_base = OTHER; note = cytidine-3'-phosphate
  modified_base 4: mod_base = OTHER; note = adenosine-3'-phosphate
  modified_base 5: mod_base = OTHER; note = guanosine-3'-phosphate
  modified_base 6: mod_base = OTHER; note = 2'-O-methylguanosine-3'-phosphate
  modified_base 7: mod_base = OTHER; note = 2'-O-methylcytidine-3'-phosphate
  modified_base 8: mod_base = OTHER; note = cytidine-3'-phosphate
  modified_base 9: mod_base = OTHER; note = uridine-3'-phosphate
  modified_base 10: mod_base = OTHER; note = 2'-O-methyladenosine-3'-phosphate
  modified_base 11: mod_base = OTHER; note = 2'-O-methyluridine-3'-phosphate
  modified_base 12: mod_base = OTHER; note = guanosine-3'-phosphate
  modified_base 13: mod_base = OTHER; note = adenosine-3'-phosphate
  modified_base 14: mod_base = OTHER; note = guanosine-3'-phosphate
  modified_base 15: mod_base = OTHER; note = guanosine-3'-phosphate
  modified_base 16: mod_base = OTHER; note = guanosine-3'-phosphate
  modified_base 17: mod_base = OTHER; note = 2'-O-methyluridine-3'-phosphate
  modified_base 18: mod_base = OTHER; note = 2'-O-methylguanosine-3'-phosphate
  modified_base 19: mod_base = OTHER; note = 2'-O-methylcytidine-3'-phosphate
  modified_base 20: mod_base = OTHER; note = 2'-deoxythymidine-3'-phosphorothioate
  misc_feature 1..19: note = RNA
  misc_feature 20..21: note = DNA
tccaggcctatgagggtgctt

SEQ ID NO: 257 - DNA, 21 bp, synthetic construct
  source 1..21: mol_type = other DNA
  modified_base 1: mod_base = OTHER; note = guanosine-3'-phosphate
  modified_base 2: mod_base = OTHER; note = 2'-deoxy-2'-fluorocytidine-3'-phosphate
  modified_base 3: mod_base = OTHER; note = adenosine-3'-phosphate
  modified_base 4: mod_base = OTHER; note = 2'-deoxy-2'-fluorocytidine-3'-phosphate
  modified_base 5: mod_base = OTHER; note = 2'-deoxy-2'-fluorocytidine-3'-phosphate
  modified_base 6: mod_base = OTHER; note = 2'-deoxy-2'-fluorocytidine-3'-phosphate
  modified_base 7: mod_base = OTHER; note = 2'-deoxy-2'-fluorouridine-3'-phosphate
  modified_base 8: mod_base = OTHER; note = 2'-deoxy-2'-fluorocytidine-3'-phosphate
  modified_base 9: mod_base = OTHER; note = adenosine-3'-phosphate
  modified_base 10: mod_base = OTHER; note = 2'-deoxy-2'-fluorouridine-3'-phosphate
  modified_base 11: mod_base = OTHER; note = adenosine-3'-phosphate
  modified_base 12: mod_base = OTHER; note = guanosine-3'-phosphate
  modified_base 13: mod_base = OTHER; note = guanosine-3'-phosphate
  modified_base 14: mod_base = OTHER; note = 2'-deoxy-2'-fluorocytidine-3'-phosphate
  modified_base 15: mod_base = OTHER; note = 2'-deoxy-2'-fluorocytidine-3'-phosphate
  modified_base 16: mod_base = OTHER; note = 2'-deoxy-2'-fluorouridine-3'-phosphate
  modified_base 17: mod_base = OTHER; note = guanosine-3'-phosphate
  modified_base 18: mod_base = OTHER; note = guanosine-3'-phosphate
  modified_base 19: mod_base = OTHER; note = adenosine-3'-phosphate
  modified_base 20: mod_base = OTHER; note = 2'-deoxythymidine-3'-phosphorothioate
  misc_feature 1..19: note = RNA
  misc_feature 20..21: note = DNA
gcaccctcataggcctggatt

SEQ ID NO: 258 - DNA, 21 bp, synthetic construct
  source 1..21: mol_type = other DNA
  modified_base 1: mod_base = OTHER; note = uridine-3'-phosphate
  modified_base 2: mod_base = OTHER; note = cytidine-3'-phosphate
  modified_base 3: mod_base = OTHER; note = cytidine-3'-phosphate
  modified_base 4: mod_base = OTHER; note = adenosine-3'-phosphate
  modified_base 5: mod_base = OTHER; note = guanosine-3'-phosphate
  modified_base 6: mod_base = OTHER; note = 2'-O-methylguanosine-3'-phosphate
  modified_base 7: mod_base = OTHER; note = 2'-O-methylcytidine-3'-phosphate
  modified_base 8: mod_base = OTHER; note = cytidine-3'-phosphate
  modified_base 9: mod_base = OTHER; note = uridine-3'-phosphate
  modified_base 10: mod_base = OTHER; note = 2'-O-methyladenosine-3'-phosphate
  modified_base 11: mod_base = OTHER; note = 2'-O-methyluridine-3'-phosphate
  modified_base 12: mod_base = OTHER; note = guanosine-3'-phosphate
  modified_base 13: mod_base = OTHER; note = adenosine-3'-phosphate
  modified_base 14: mod_base = OTHER; note = guanosine-3'-phosphate
  modified_base 15: mod_base = OTHER; note = guanosine-3'-phosphate
  modified_base 16: mod_base = OTHER; note = guanosine-3'-phosphate
  modified_base 17: mod_base = OTHER; note = 2'-O-methyluridine-3'-phosphate
  modified_base 18: mod_base = OTHER; note = 2'-O-methylguanosine-3'-phosphate
  modified_base 19: mod_base = OTHER; note = 2'-O-methylcytidine-3'-phosphate
  modified_base 20: mod_base = OTHER; note = 2'-deoxythymidine-3'-phosphorothioate
  misc_feature 1..19: note = RNA
  misc_feature 20..21: note = DNA
tccaggcctatgagggtgctt

SEQ ID NO: 259 - DNA, 21 bp, synthetic construct
  source 1..21: mol_type = other DNA
  modified_base 1: mod_base = OTHER; note = guanosine-3'-phosphate
  modified_base 2: mod_base = OTHER; note = 2'-O-methylcytidine-3'-phosphate
  modified_base 3: mod_base = OTHER; note = adenosine-3'-phosphate
  modified_base 4: mod_base = OTHER; note = 2'-O-methylcytidine-3'-phosphate
  modified_base 5: mod_base = OTHER; note = cytidine-3'-phosphate
  modified_base 6: mod_base = OTHER; note = 2'-O-methylcytidine-3'-phosphate
  modified_base 7: mod_base = OTHER; note = uridine-3'-phosphate
  modified_base 8: mod_base = OTHER; note = 2'-O-methylcytidine-3'-phosphate
  modified_base 9: mod_base = OTHER; note = adenosine-3'-phosphate
  modified_base 10: mod_base = OTHER; note = 2'-O-methyluridine-3'-phosphate
  modified_base 11: mod_base = OTHER; note = adenosine-3'-phosphate
  modified_base 12: mod_base = OTHER; note = 2'-O-methylguanosine-3'-phosphate
  modified_base 13: mod_base = OTHER; note = guanosine-3'-phosphate
  modified_base 14: mod_base = OTHER; note = 2'-O-methylcytidine-3'-phosphate
  modified_base 15: mod_base = OTHER; note = cytidine-3'-phosphate
  modified_base 16: mod_base = OTHER; note = 2'-O-methyluridine-3'-phosphate
  modified_base 17: mod_base = OTHER; note = guanosine-3'-phosphate
  modified_base 18: mod_base = OTHER; note = 2'-O-methylguanosine-3'-phosphate
  modified_base 19: mod_base = OTHER; note = adenosine-3'-phosphate
  modified_base 20: mod_base = OTHER; note = 2'-deoxythymidine-3'-phosphorothioate
  misc_feature 1..19: note = RNA
  misc_feature 20..21: note = DNA
gcaccctcataggcctggatt

SEQ ID NO: 260 - DNA, 21 bp, synthetic construct
  source 1..21: mol_type = other DNA
  modified_base 1: mod_base = OTHER; note = uridine-3'-phosphate
  modified_base 2: mod_base = OTHER; note = cytidine-3'-phosphate
  modified_base 3: mod_base = OTHER; note = cytidine-3'-phosphate
  modified_base 4: mod_base = OTHER; note = adenosine-3'-phosphate
  modified_base 5: mod_base = OTHER; note = guanosine-3'-phosphate
  modified_base 6: mod_base = OTHER; note = 2'-O-methylguanosine-3'-phosphate
  modified_base 7: mod_base = OTHER; note = 2'-O-methylcytidine-3'-phosphate
  modified_base 8: mod_base = OTHER; note = cytidine-3'-phosphate
  modified_base 9: mod_base = OTHER; note = uridine-3'-phosphate
  modified_base 10: mod_base = OTHER; note = 2'-O-methyladenosine-3'-phosphate
  modified_base 11: mod_base = OTHER; note = 2'-O-methyluridine-3'-phosphate
  modified_base 12: mod_base = OTHER; note = guanosine-3'-phosphate
  modified_base 13: mod_base = OTHER; note = adenosine-3'-phosphate
  modified_base 14: mod_base = OTHER; note = guanosine-3'-phosphate
  modified_base 15: mod_base = OTHER; note = guanosine-3'-phosphate
  modified_base 16: mod_base = OTHER; note = guanosine-3'-phosphate
  modified_base 17: mod_base = OTHER; note = 2'-O-methyluridine-3'-phosphate
  modified_base 18: mod_base = OTHER; note = 2'-O-methylguanosine-3'-phosphate
  modified_base 19: mod_base = OTHER; note = 2'-O-methylcytidine-3'-phosphate
  modified_base 20: mod_base = OTHER; note = 2'-deoxythymidine-3'-phosphorothioate
  misc_feature 1..19: note = RNA
  misc_feature 20..21: note = DNA
tccaggcctatgagggtgctt

SEQ ID NO: 261 - DNA, 21 bp, synthetic construct
  source 1..21: mol_type = other DNA
  modified_base 1: mod_base = OTHER; note = uridine-3'-phosphate
  modified_base 2: mod_base = OTHER; note = guanosine-3'-phosphate
  modified_base 3: mod_base = OTHER; note = uridine-3'-phosphate
  modified_base 4: mod_base = OTHER; note = adenosine-3'-phosphate
  modified_base 5: mod_base = OTHER; note = uridine-3'-phosphate
  modified_base 6: mod_base = OTHER; note = cytidine-3'-phosphate
  modified_base 7: mod_base = OTHER; note = uridine-3'-phosphate
  modified_base 8: mod_base = OTHER; note = cytidine-3'-phosphate
  modified_base 9: mod_base = OTHER; note = cytidine-3'-phosphate
  modified_base 10: mod_base = OTHER; note = uridine-3'-phosphate
  modified_base 11: mod_base = OTHER; note = adenosine-3'-phosphate
  modified_base 12: mod_base = OTHER; note = guanosine-3'-phosphate
  modified_base 13: mod_base = OTHER; note = adenosine-3'-phosphate
  modified_base 14: mod_base = OTHER; note = cytidine-3'-phosphate
  modified_base 15: mod_base = OTHER; note = adenosine-3'-phosphate
  modified_base 16: mod_base = OTHER; note = cytidine-3'-phosphate
  modified_base 17: mod_base = OTHER; note = cytidine-3'-phosphate
  modified_base 18: mod_base = OTHER; note = adenosine-3'-phosphate
  modified_base 19: mod_base = OTHER; note = guanosine-3'-phosphate
  modified_base 20: mod_base = OTHER; note = 2'-deoxythymidine-3'-phosphorothioate
  misc_feature 1..19: note = RNA
  misc_feature 20..21: note = DNA
tgtatctcctagacaccagtt

SEQ ID NO: 262 - DNA, 21 bp, synthetic construct
  source 1..21: mol_type = other DNA
  modified_base 1: mod_base = OTHER; note = cytidine-3'-phosphate
  modified_base 2: mod_base = OTHER; note = uridine-3'-phosphate
  modified_base 3: mod_base = OTHER; note = guanosine-3'-phosphate
  modified_base 4: mod_base = OTHER; note = guanosine-3'-phosphate
  modified_base 5: mod_base = OTHER; note = uridine-3'-phosphate
  modified_base 6: mod_base = OTHER; note = guanosine-3'-phosphate
  modified_base 7: mod_base = OTHER; note = uridine-3'-phosphate
  modified_base 8: mod_base = OTHER; note = cytidine-3'-phosphate
  modified_base 9: mod_base = OTHER; note = uridine-3'-phosphate
  modified_base 10: mod_base = OTHER; note = adenosine-3'-phosphate
  modified_base 11: mod_base = OTHER; note = guanosine-3'-phosphate
  modified_base 12: mod_base = OTHER; note = guanosine-3'-phosphate
  modified_base 13: mod_base = OTHER; note = adenosine-3'-phosphate
  modified_base 14: mod_base = OTHER; note = guanosine-3'-phosphate
  modified_base 15: mod_base = OTHER; note = adenosine-3'-phosphate
  modified_base 16: mod_base = OTHER; note = uridine-3'-phosphate
  modified_base 17: mod_base = OTHER; note = adenosine-3'-phosphate
  modified_base 18: mod_base = OTHER; note = cytidine-3'-phosphate
  modified_base 19: mod_base = OTHER; note = adenosine-3'-phosphate
  modified_base 20: mod_base = OTHER; note = 2'-deoxythymidine-3'-phosphorothioate
  misc_feature 1..19: note = RNA
  misc_feature 20..21: note = DNA
ctggtgtctaggagatacatt

SEQ ID NO: 263 - DNA, 21 bp, synthetic construct
  source 1..21: mol_type = other DNA
  modified_base 1: mod_base = OTHER; note = 2'-O-methyluridine-3'-phosphate
  modified_base 2: mod_base = OTHER; note = guanosine-3'-phosphate
  modified_base 3: mod_base = OTHER; note = 2'-O-methyluridine-3'-phosphate
  modified_base 4: mod_base = OTHER; note = adenosine-3'-phosphate
  modified_base 5: mod_base = OTHER; note = 2'-O-methyluridine-3'-phosphate
  modified_base 6: mod_base = OTHER; note = 2'-O-methylcytidine-3'-phosphate
  modified_base 7: mod_base = OTHER; note = 2'-O-methyluridine-3'-phosphate
  modified_base 8: mod_base = OTHER; note = 2'-O-methylcytidine-3'-phosphate
  modified_base 9: mod_base = OTHER; note = 2'-O-methylcytidine-3'-phosphate
  modified_base 10: mod_base = OTHER; note = 2'-O-methyluridine-3'-phosphate
  modified_base 11: mod_base = OTHER; note = adenosine-3'-phosphate
  modified_base 12: mod_base = OTHER; note = guanosine-3'-phosphate
  modified_base 13: mod_base = OTHER; note = adenosine-3'-phosphate
  modified_base 14: mod_base = OTHER; note = 2'-O-methylcytidine-3'-phosphate
  modified_base 15: mod_base = OTHER; note = adenosine-3'-phosphate
  modified_base 16: mod_base = OTHER; note = 2'-O-methylcytidine-3'-phosphate
  modified_base 17: mod_base = OTHER; note = 2'-O-methylcytidine-3'-phosphate
  modified_base 18: mod_base = OTHER; note = adenosine-3'-phosphate
  modified_base 19: mod_base = OTHER; note = guanosine-3'-phosphate
  modified_base 20: mod_base = OTHER; note = 2'-deoxythymidine-3'-phosphorothioate
  misc_feature 1..19: note = RNA
  misc_feature 20..21: note = DNA
tgtatctcctagacaccagtt

SEQ ID NO: 264 - DNA, 21 bp, synthetic construct
  source 1..21: mol_type = other DNA
  modified_base 1: mod_base = OTHER; note = cytidine-3'-phosphate
  modified_base 2: mod_base = OTHER; note = uridine-3'-phosphate
  modified_base 3: mod_base = OTHER; note = guanosine-3'-phosphate
  modified_base 4: mod_base = OTHER; note = guanosine-3'-phosphate
  modified_base 5: mod_base = OTHER; note = uridine-3'-phosphate
  modified_base 6: mod_base = OTHER; note = guanosine-3'-phosphate
  modified_base 7: mod_base = OTHER; note = uridine-3'-phosphate
  modified_base 8: mod_base = OTHER; note = cytidine-3'-phosphate
  modified_base 9: mod_base = OTHER; note = 2'-O-methyluridine-3'-phosphate
  modified_base 10: mod_base = OTHER; note = adenosine-3'-phosphate
  modified_base 11: mod_base = OTHER; note = guanosine-3'-phosphate
  modified_base 12: mod_base = OTHER; note = guanosine-3'-phosphate
  modified_base 13: mod_base = OTHER; note = adenosine-3'-phosphate
  modified_base 14: mod_base = OTHER; note = guanosine-3'-phosphate
  modified_base 15: mod_base = OTHER; note = adenosine-3'-phosphate
  modified_base 16: mod_base = OTHER; note = 2'-O-methyluridine-3'-phosphate
  modified_base 17: mod_base = OTHER; note = adenosine-3'-phosphate
  modified_base 18: mod_base = OTHER; note = 2'-O-methylcytidine-3'-phosphate
  modified_base 19: mod_base = OTHER; note = adenosine-3'-phosphate
  modified_base 20: mod_base = OTHER; note = 2'-deoxythymidine-3'-phosphorothioate
  misc_feature 1..19: note = RNA
  misc_feature 20..21: note = DNA
ctggtgtctaggagatacatt

SEQ ID NO: 265 - DNA, 21 bp, synthetic construct
  source 1..21: mol_type = other DNA
  modified_base 1: mod_base = OTHER; note = uridine-3'-phosphate
  modified_base 2: mod_base = OTHER; note = cytidine-3'-phosphate
  modified_base 3: mod_base = OTHER; note = uridine-3'-phosphate
  modified_base 4: mod_base = OTHER; note = cytidine-3'-phosphate
  modified_base 5: mod_base = OTHER; note = cytidine-3'-phosphate
  modified_base 6: mod_base = OTHER; note = uridine-3'-phosphate
  modified_base 7: mod_base = OTHER; note = adenosine-3'-phosphate
  modified_base 8: mod_base = OTHER; note = guanosine-3'-phosphate
  modified_base 9: mod_base = OTHER; note = adenosine-3'-phosphate
  modified_base 10: mod_base = OTHER; note = cytidine-3'-phosphate
  modified_base 11: mod_base = OTHER; note = adenosine-3'-phosphate
  modified_base 12: mod_base = OTHER; note = cytidine-3'-phosphate
  modified_base 13: mod_base = OTHER; note = cytidine-3'-phosphate
  modified_base 14: mod_base = OTHER; note = adenosine-3'-phosphate
  modified_base 15: mod_base = OTHER; note = guanosine-3'-phosphate
  modified_base 16: mod_base = OTHER; note = cytidine-3'-phosphate
  modified_base 17: mod_base = OTHER; note = adenosine-3'-phosphate
  modified_base 18: mod_base = OTHER; note = uridine-3'-phosphate
  modified_base 19: mod_base = OTHER; note = adenosine-3'-phosphate
  modified_base 20: mod_base = OTHER; note = 2'-deoxythymidine-3'-phosphorothioate
  misc_feature 1..19: note = RNA
  misc_feature 20..21: note = DNA
tctcctagacaccagcatatt

SEQ ID NO: 266 - DNA, 21 bp, synthetic construct
  source 1..21: mol_type = other DNA
  modified_base 1: mod_base = OTHER; note = uridine-3'-phosphate
  modified_base 2: mod_base = OTHER; note = adenosine-3'-phosphate
  modified_base 3: mod_base = OTHER; note = uridine-3'-phosphate
  modified_base 4: mod_base = OTHER; note = guanosine-3'-phosphate
  modified_base 5: mod_base = OTHER; note = cytidine-3'-phosphate
  modified_base 6: mod_base = OTHER; note = uridine-3'-phosphate
  modified_base 7: mod_base = OTHER; note = guanosine-3'-phosphate
  modified_base 8: mod_base = OTHER; note = guanosine-3'-phosphate
  modified_base 9: mod_base = OTHER; note = uridine-3'-phosphate
  modified_base 10: mod_base = OTHER; note = guanosine-3'-phosphate
  modified_base 11: mod_base = OTHER; note = uridine-3'-phosphate
  modified_base 12: mod_base = OTHER; note = cytidine-3'-phosphate
  modified_base 13: mod_base = OTHER; note = uridine-3'-phosphate
  modified_base 14: mod_base = OTHER; note = adenosine-3'-phosphate
  modified_base 15: mod_base = OTHER; note = guanosine-3'-phosphate
  modified_base 16: mod_base = OTHER; note = guanosine-3'-phosphate
  modified_base 17: mod_base = OTHER; note = adenosine-3'-phosphate
  modified_base 18: mod_base = OTHER; note = guanosine-3'-phosphate
  modified_base 19: mod_base = OTHER; note = adenosine-3'-phosphate
  modified_base 20: mod_base = OTHER; note = 2'-deoxythymidine-3'-phosphorothioate
  misc_feature 1..19: note = RNA
  misc_feature 20..21: note = DNA
tatgctggtgtctaggagatt

SEQ ID NO: 267 - DNA, 21 bp, synthetic construct
  source 1..21: mol_type = other DNA
  modified_base 1: mod_base = OTHER; note = 2'-O-methyluridine-3'-phosphate
  modified_base 2: mod_base = OTHER; note = 2'-O-methylcytidine-3'-phosphate
  modified_base 3: mod_base = OTHER; note = 2'-O-methyluridine-3'-phosphate
  modified_base 4: mod_base = OTHER; note = 2'-O-methylcytidine-3'-phosphate
  modified_base 5: mod_base = OTHER; note = 2'-O-methylcytidine-3'-phosphate
  modified_base 6: mod_base = OTHER; note = 2'-O-methyluridine-3'-phosphate
  modified_base 7: mod_base = OTHER; note = adenosine-3'-phosphate
  modified_base 8: mod_base = OTHER; note = guanosine-3'-phosphate
  modified_base 9: mod_base = OTHER; note = adenosine-3'-phosphate
  modified_base 10: mod_base = OTHER; note = 2'-O-methylcytidine-3'-phosphate
  modified_base 11: mod_base = OTHER; note = adenosine-3'-phosphate
  modified_base 12: mod_base = OTHER; note = 2'-O-methylcytidine-3'-phosphate
  modified_base 13: mod_base = OTHER; note = 2'-O-methylcytidine-3'-phosphate
  modified_base 14: mod_base = OTHER; note = adenosine-3'-phosphate
  modified_base 15: mod_base = OTHER; note = guanosine-3'-phosphate
  modified_base 16: mod_base = OTHER; note = 2'-O-methylcytidine-3'-phosphate
  modified_base 17: mod_base = OTHER; note = adenosine-3'-phosphate
  modified_base 18: mod_base = OTHER; note = 2'-O-methyluridine-3'-phosphate
  modified_base 19: mod_base = OTHER; note = adenosine-3'-phosphate
  modified_base 20: mod_base = OTHER; note = 2'-deoxythymidine-3'-phosphorothioate
  misc_feature 1..19: note = RNA
  misc_feature 20..21: note = DNA
tctcctagacaccagcatatt

SEQ ID NO: 268 - DNA, 21 bp, synthetic construct
  source 1..21: mol_type = other DNA
  modified_base 1: mod_base = OTHER; note = 2'-O-methyluridine-3'-phosphate
  modified_base 2: mod_base = OTHER; note = adenosine-3'-phosphate
  modified_base 3: mod_base = OTHER; note = uridine-3'-phosphate
  modified_base 4: mod_base = OTHER; note = guanosine-3'-phosphate
  modified_base 5: mod_base = OTHER; note = cytidine-3'-phosphate
  modified_base 6: mod_base = OTHER; note = uridine-3'-phosphate
  modified_base 7: mod_base = OTHER; note = guanosine-3'-phosphate
  modified_base 8: mod_base = OTHER; note = guanosine-3'-phosphate
  modified_base 9: mod_base = OTHER; note = uridine-3'-phosphate
  modified_base 10: mod_base = OTHER; note = guanosine-3'-phosphate
  modified_base 11: mod_base = OTHER; note = uridine-3'-phosphate
  modified_base 12: mod_base = OTHER; note = cytidine-3'-phosphate
  modified_base 13: mod_base = OTHER; note = 2'-O-methyluridine-3'-phosphate
  modified_base 14: mod_base = OTHER; note = adenosine-3'-phosphate
  modified_base 15: mod_base = OTHER; note = guanosine-3'-phosphate
  modified_base 16: mod_base = OTHER; note = guanosine-3'-phosphate
  modified_base 17: mod_base = OTHER; note = adenosine-3'-phosphate
  modified_base 18: mod_base = OTHER; note = guanosine-3'-phosphate
  modified_base 19: mod_base = OTHER; note = adenosine-3'-phosphate
  modified_base 20: mod_base = OTHER; note = 2'-deoxythymidine-3'-phosphorothioate
  misc_feature 1..19: note = RNA
  misc_feature 20..21: note = DNA
tatgctggtgtctaggagatt

SEQ ID NO: 269 - DNA, 21 bp, synthetic construct
  source 1..21: mol_type = other DNA
  modified_base 1: mod_base = OTHER; note = 2'-deoxy-2'-fluorouridine-3'-phosphate
  modified_base 2: mod_base = OTHER; note = 2'-O-methylcytidine-3'-phosphate
  modified_base 3: mod_base = OTHER; note = 2'-deoxy-2'-fluorouridine-3'-phosphate
  modified_base 4: mod_base = OTHER; note = 2'-O-methylcytidine-3'-phosphate
  modified_base 5: mod_base = OTHER; note = 2'-deoxy-2'-fluorocytidine-3'-phosphate
  modified_base 6: mod_base = OTHER; note = 2'-O-methyluridine-3'-phosphate
  modified_base 7: mod_base = OTHER; note = 2'-deoxy-2'-fluoroadenosine-3'-phosphate
  modified_base 8: mod_base = OTHER; note = 2'-O-methylguanosine-3'-phosphate
  modified_base 9: mod_base = OTHER; note = 2'-deoxy-2'-fluoroadenosine-3'-phosphate
  modified_base 10: mod_base = OTHER; note = 2'-O-methylcytidine-3'-phosphate
  modified_base 11: mod_base = OTHER; note = 2'-deoxy-2'-fluoroadenosine-3'-phosphate
  modified_base 12: mod_base = OTHER; note = 2'-O-methylcytidine-3'-phosphate
  modified_base 13: mod_base = OTHER; note = 2'-deoxy-2'-fluorocytidine-3'-phosphate
  modified_base 14: mod_base = OTHER; note = 2'-O-methyladenosine-3'-phosphate
  modified_base 15: mod_base = OTHER; note = 2'-deoxy-2'-fluoroguanosine-3'-phosphate
  modified_base 16: mod_base = OTHER; note = 2'-O-methylcytidine-3'-phosphate
  modified_base 17: mod_base = OTHER; note = 2'-deoxy-2'-fluoroadenosine-3'-phosphate
  modified_base 18: mod_base = OTHER; note = 2'-O-methyluridine-3'-phosphate
  modified_base 19: mod_base = OTHER; note = 2'-deoxy-2'-fluoroadenosine-3'-phosphate
  modified_base 20: mod_base = OTHER; note = 2'-deoxythymidine-3'-phosphorothioate
  misc_feature 1..19: note = RNA
  misc_feature 20..21: note = DNA
tctcctagacaccagcatatt

SEQ ID NO: 270 - DNA, 21 bp, synthetic construct
  source 1..21: mol_type = other DNA
  modified_base 1: mod_base = OTHER; note = 2'-O-methyluridine-3'-phosphate 5'phosphate
  modified_base 2: mod_base = OTHER; note = 2'-deoxy-2'-fluoroadenosine-3'-phosphate
  modified_base 3: mod_base = OTHER; note = 2'-O-methyluridine-3'-phosphate
  modified_base 4: mod_base = OTHER; note = 2'-deoxy-2'-fluoroguanosine-3'-phosphate
  modified_base 5: mod_base = OTHER; note = 2'-O-methylcytidine-3'-phosphate
  modified_base 6: mod_base = OTHER; note = 2'-deoxy-2'-fluorouridine-3'-phosphate
  modified_base 7: mod_base = OTHER; note = 2'-O-methylguanosine-3'-phosphate
  modified_base 8: mod_base = OTHER; note = 2'-deoxy-2'-fluoroguanosine-3'-phosphate
  modified_base 9: mod_base = OTHER; note = 2'-O-methyluridine-3'-phosphate
  modified_base 10: mod_base = OTHER; note = 2'-deoxy-2'-fluoroguanosine-3'-phosphate
  modified_base 11: mod_base = OTHER; note = 2'-O-methyluridine-3'-phosphate
  modified_base 12: mod_base = OTHER; note = 2'-deoxy-2'-fluorocytidine-3'-phosphate
  modified_base 13: mod_base = OTHER; note = 2'-O-methyluridine-3'-phosphate
  modified_base 14: mod_base = OTHER; note = 2'-deoxy-2'-fluoroadenosine-3'-phosphate
  modified_base 15: mod_base = OTHER; note = 2'-O-methylguanosine-3'-phosphate
  modified_base 16: mod_base = OTHER; note = 2'-deoxy-2'-fluoroguanosine-3'-phosphate
  modified_base 17: mod_base = OTHER; note = 2'-O-methyladenosine-3'-phosphate
  modified_base 18: mod_base = OTHER; note = 2'-deoxy-2'-fluoroguanosine-3'-phosphate
  modified_base 19: mod_base = OTHER; note = 2'-O-methyladenosine-3'-phosphate
  modified_base 20: mod_base = OTHER; note = 2'-deoxythymidine-3'-phosphorothioate
  misc_feature 1..19: note = RNA
  misc_feature 20..21: note = DNA
tatgctggtgtctaggagatt

SEQ ID NO: 271 - DNA, 21 bp, synthetic construct
  source 1..21: mol_type = other DNA
  modified_base 1: mod_base = OTHER; note = 2'-deoxy-2'-fluorouridine-3'-phosphate
  modified_base 2: mod_base = OTHER; note = 2'-deoxy-2'-fluorocytidine-3'-phosphate
  modified_base 3: mod_base = OTHER; note = 2'-deoxy-2'-fluorouridine-3'-phosphate
  modified_base 4: mod_base = OTHER; note = 2'-deoxy-2'-fluorocytidine-3'-phosphate
  modified_base 5: mod_base = OTHER; note = 2'-deoxy-2'-fluorocytidine-3'-phosphate
  modified_base 6: mod_base = OTHER; note = 2'-deoxy-2'-fluorouridine-3'-phosphate
  modified_base 7: mod_base = OTHER; note = adenosine-3'-phosphate
  modified_base 8: mod_base = OTHER; note = guanosine-3'-phosphate
  modified_base 9: mod_base = OTHER; note = adenosine-3'-phosphate
  modified_base 10: mod_base = OTHER; note = 2'-deoxy-2'-fluorocytidine-3'-phosphate
  modified_base 11: mod_base = OTHER; note = adenosine-3'-phosphate
  modified_base 12: mod_base = OTHER; note = 2'-deoxy-2'-fluorocytidine-3'-phosphate
  modified_base 13: mod_base = OTHER; note = 2'-deoxy-2'-fluorocytidine-3'-phosphate
  modified_base 14: mod_base = OTHER; note = adenosine-3'-phosphate
  modified_base 15: mod_base = OTHER; note = guanosine-3'-phosphate
  modified_base 16: mod_base = OTHER; note = 2'-deoxy-2'-fluorocytidine-3'-phosphate
  modified_base 17: mod_base = OTHER; note = adenosine-3'-phosphate
  modified_base 18: mod_base = OTHER; note = 2'-deoxy-2'-fluorouridine-3'-phosphate
  modified_base 19: mod_base = OTHER; note = adenosine-3'-phosphate
  modified_base 20: mod_base = OTHER; note = 2'-deoxythymidine-3'-phosphorothioate
  misc_feature 1..19: note = RNA
  misc_feature 20..21: note = DNA
tctcctagacaccagcatatt

SEQ ID NO: 272 - DNA, 21 bp, synthetic construct
  source 1..21: mol_type = other DNA
  modified_base 1: mod_base = OTHER; note = 2'-deoxy-2'-fluorouridine-3'-phosphate
  modified_base 2: mod_base = OTHER; note = adenosine-3'-phosphate
  modified_base 3: mod_base = OTHER; note = 2'-deoxy-2'-fluorouridine-3'-phosphate
  modified_base 4: mod_base = OTHER; note = guanosine-3'-phosphate
  modified_base 5: mod_base = OTHER; note = 2'-deoxy-2'-fluorocytidine-3'-phosphate
  modified_base 6: mod_base = OTHER; note = 2'-deoxy-2'-fluorouridine-3'-phosphate
  modified_base 7: mod_base = OTHER; note = guanosine-3'-phosphate
  modified_base 8: mod_base = OTHER; note = guanosine-3'-phosphate
  modified_base 9: mod_base = OTHER; note = 2'-deoxy-2'-fluorouridine-3'-phosphate
  modified_base 10: mod_base = OTHER; note = guanosine-3'-phosphate
  modified_base 11: mod_base = OTHER; note = 2'-deoxy-2'-fluorouridine-3'-phosphate
  modified_base 12: mod_base = OTHER; note = 2'-deoxy-2'-fluorocytidine-3'-phosphate
  modified_base 13: mod_base = OTHER; note = 2'-deoxy-2'-fluorouridine-3'-phosphate
  modified_base 14: mod_base = OTHER; note = adenosine-3'-phosphate
  modified_base 15: mod_base = OTHER; note = guanosine-3'-phosphate
  modified_base 16: mod_base = OTHER; note = guanosine-3'-phosphate
  modified_base 17: mod_base = OTHER; note = adenosine-3'-phosphate
  modified_base 18: mod_base = OTHER; note = guanosine-3'-phosphate
  modified_base 19: mod_base = OTHER; note = adenosine-3'-phosphate
  modified_base 20: mod_base = OTHER; note = 2'-deoxythymidine-3'-phosphorothioate
  misc_feature 1..19: note = RNA
  misc_feature 20..21: note = DNA
tatgctggtgtctaggagatt

SEQ ID NO: 273 - DNA, 21 bp, synthetic construct
  source 1..21: mol_type = other DNA
  modified_base 1: mod_base = OTHER; note = uridine-3'-phosphate
  modified_base 2: mod_base = OTHER; note = 2'-O-methylcytidine-3'-phosphate
  modified_base 3: mod_base = OTHER; note = uridine-3'-phosphate
  modified_base 4: mod_base = OTHER; note = 2'-O-methylcytidine-3'-phosphate
  modified_base 5: mod_base = OTHER; note = cytidine-3'-phosphate
  modified_base 6: mod_base = OTHER; note = 2'-O-methyluridine-3'-phosphate
  modified_base 7: mod_base = OTHER; note = adenosine-3'-phosphate
  modified_base 8: mod_base = OTHER; note = 2'-O-methylguanosine-3'-phosphate
  modified_base 9: mod_base = OTHER; note = adenosine-3'-phosphate
  modified_base 10: mod_base = OTHER; note = 2'-O-methylcytidine-3'-phosphate
  modified_base 11: mod_base = OTHER; note = adenosine-3'-phosphate
  modified_base 12: mod_base = OTHER; note = 2'-O-methylcytidine-3'-phosphate
  modified_base 13: mod_base = OTHER; note = cytidine-3'-phosphate
  modified_base 14: mod_base = OTHER; note = 2'-O-methyladenosine-3'-phosphate
  modified_base 15: mod_base = OTHER; note = guanosine-3'-phosphate
  modified_base 16: mod_base = OTHER; note = 2'-O-methylcytidine-3'-phosphate
  modified_base 17: mod_base = OTHER; note = adenosine-3'-phosphate
  modified_base 18: mod_base = OTHER; note = 2'-O-methyluridine-3'-phosphate
  modified_base 19: mod_base = OTHER; note = adenosine-3'-phosphate
  modified_base 20: mod_base = OTHER; note = 2'-deoxythymidine-3'-phosphorothioate
  misc_feature 1..19: note = RNA
  misc_feature 20..21: note = DNA
tctcctagacaccagcatatt

SEQ ID NO: 274 - DNA, 21 bp, synthetic construct
  source 1..21: mol_type = other DNA
  modified_base 1: mod_base = OTHER; note = 2'-O-methyluridine-3'-phosphate 5'phosphate
  modified_base 2: mod_base = OTHER; note = 2'-deoxy-2'-fluoroadenosine-3'-phosphate
  modified_base 3: mod_base = OTHER; note = 2'-O-methyluridine-3'-phosphate
  modified_base 4: mod_base = OTHER; note = 2'-deoxy-2'-fluoroguanosine-3'-phosphate
  modified_base 5: mod_base = OTHER; note = 2'-O-methylcytidine-3'-phosphate
  modified_base 6: mod_base = OTHER; note = 2'-deoxy-2'-fluorouridine-3'-phosphate
  modified_base 7: mod_base = OTHER; note = 2'-O-methylguanosine-3'-phosphate
  modified_base 8: mod_base = OTHER; note = 2'-deoxy-2'-fluoroguanosine-3'-phosphate
  modified_base 9: mod_base = OTHER; note = 2'-O-methyluridine-3'-phosphate
  modified_base 10: mod_base = OTHER; note = 2'-deoxy-2'-fluoroguanosine-3'-phosphate
  modified_base 11: mod_base = OTHER; note = 2'-O-methyluridine-3'-phosphate
  modified_base 12: mod_base = OTHER; note = 2'-deoxy-2'-fluorocytidine-3'-phosphate
  modified_base 13: mod_base = OTHER; note = 2'-O-methyluridine-3'-phosphate
  modified_base 14: mod_base = OTHER; note = 2'-deoxy-2'-fluoroadenosine-3'-phosphate
  modified_base 15: mod_base = OTHER; note = 2'-O-methylguanosine-3'-phosphate
  modified_base 16: mod_base = OTHER; note = 2'-deoxy-2'-fluoroguanosine-3'-phosphate
  modified_base 17: mod_base = OTHER; note = 2'-O-methyladenosine-3'-phosphate
  modified_base 18: mod_base = OTHER; note = 2'-deoxy-2'-fluoroguanosine-3'-phosphate
  modified_base 19: mod_base = OTHER; note = 2'-O-methyladenosine-3'-phosphate
  modified_base 20: mod_base = OTHER; note = 2'-deoxythymidine-3'-phosphorothioate
  misc_feature 1..19: note = RNA
  misc_feature 20..21: note = DNA
tatgctggtgtctaggagatt

SEQ ID NO: 275 - DNA, 21 bp, synthetic construct
  source 1..21: mol_type = other DNA
  modified_base 1: mod_base = OTHER; note = uridine-3'-phosphate
  modified_base 2: mod_base = OTHER; note = 2'-O-methylcytidine-3'-phosphate
  modified_base 3: mod_base = OTHER; note = uridine-3'-phosphate
  modified_base 4: mod_base = OTHER; note = 2'-O-methylcytidine-3'-phosphate
  modified_base 5: mod_base = OTHER; note = cytidine-3'-phosphate
  modified_base 6: mod_base = OTHER; note = 2'-O-methyluridine-3'-phosphate
  modified_base 7: mod_base = OTHER; note = adenosine-3'-phosphate
  modified_base 8: mod_base = OTHER; note = 2'-O-methylguanosine-3'-phosphate
  modified_base 9: mod_base = OTHER; note = adenosine-3'-phosphate
  modified_base 10: mod_base = OTHER; note = 2'-O-methylcytidine-3'-phosphate
  modified_base 11: mod_base = OTHER; note = adenosine-3'-phosphate
  modified_base 12: mod_base = OTHER; note = 2'-O-methylcytidine-3'-phosphate
  modified_base 13: mod_base = OTHER; note = cytidine-3'-phosphate
  modified_base 14: mod_base = OTHER; note = 2'-O-methyladenosine-3'-phosphate
  modified_base 15: mod_base = OTHER; note = guanosine-3'-phosphate
  modified_base 16: mod_base = OTHER; note = 2'-O-methylcytidine-3'-phosphate
  modified_base 17: mod_base = OTHER; note = adenosine-3'-phosphate
  modified_base 18: mod_base = OTHER; note = 2'-O-methyluridine-3'-phosphate
  modified_base 19: mod_base = OTHER; note = adenosine-3'-phosphate
  modified_base 20: mod_base = OTHER; note = 2'-deoxythymidine-3'-phosphorothioate
  misc_feature 1..19: note = RNA
  misc_feature 20..21: note = DNA
tctcctagacaccagcatatt

SEQ ID NO: 276 - DNA, 21 bp, synthetic construct
  source 1..21: mol_type = other DNA
  modified_base 1: mod_base = OTHER; note = 2'-deoxy-2'-fluorouridine-3'-phosphate
  modified_base 2: mod_base = OTHER; note = adenosine-3'-phosphate
  modified_base 3: mod_base = OTHER; note = 2'-deoxy-2'-fluorouridine-3'-phosphate
  modified_base 4: mod_base = OTHER; note = guanosine-3'-phosphate
  modified_base 5: mod_base = OTHER; note = 2'-deoxy-2'-fluorocytidine-3'-phosphate
  modified_base 6: mod_base = OTHER; note = 2'-deoxy-2'-fluorouridine-3'-phosphate
  modified_base 7: mod_base = OTHER; note = guanosine-3'-phosphate
  modified_base 8: mod_base = OTHER; note = guanosine-3'-phosphate
  modified_base 9: mod_base = OTHER; note = 2'-deoxy-2'-fluorouridine-3'-phosphate
  modified_base 10: mod_base = OTHER; note = guanosine-3'-phosphate
  modified_base 11: mod_base = OTHER; note = 2'-deoxy-2'-fluorouridine-3'-phosphate
  modified_base 12: mod_base = OTHER; note = 2'-deoxy-2'-fluorocytidine-3'-phosphate
  modified_base 13: mod_base = OTHER; note = 2'-deoxy-2'-fluorouridine-3'-phosphate
  modified_base 14: mod_base = OTHER; note = adenosine-3'-phosphate
  modified_base 15: mod_base = OTHER; note = guanosine-3'-phosphate
  modified_base 16: mod_base = OTHER; note = guanosine-3'-phosphate
  modified_base 17: mod_base = OTHER; note = adenosine-3'-phosphate
  modified_base 18: mod_base = OTHER; note = guanosine-3'-phosphate
  modified_base 19: mod_base = OTHER; note = adenosine-3'-phosphate
  modified_base 20: mod_base = OTHER; note = 2'-deoxythymidine-3'-phosphorothioate
  misc_feature 1..19: note = RNA
  misc_feature 20..21: note = DNA
tatgctggtgtctaggagatt

SEQ ID NO: 277 - DNA, 21 bp, synthetic construct
  source 1..21: mol_type = other DNA
  modified_base 1: mod_base = OTHER; note = 2'-deoxy-2'-fluorouridine-3'-phosphate
  modified_base 2: mod_base = OTHER; note = 2'-O-methylcytidine-3'-phosphate
  modified_base 3: mod_base = OTHER; note = 2'-deoxy-2'-fluorouridine-3'-phosphate
  modified_base 4: mod_base = OTHER; note = 2'-O-methylcytidine-3'-phosphate
  modified_base 5: mod_base = OTHER; note = 2'-deoxy-2'-fluorocytidine-3'-phosphate
  modified_base 6: mod_base = OTHER; note = 2'-O-methyluridine-3'-phosphate
  modified_base 7: mod_base = OTHER; note = adenosine-3'-phosphate
  modified_base 8: mod_base = OTHER; note = modified guanosine 3'-phosphate
  modified_base 9: mod_base = OTHER; note = 2'-deoxy-2'-fluoroadenosine-3'-phosphate
  modified_base 10: mod_base = OTHER; note = 2'-O-methylcytidine-3'-phosphate
  modified_base 11: mod_base = OTHER; note = 2'-deoxy-2'-fluoroadenosine-3'-phosphate
  modified_base 12: mod_base = OTHER; note = 2'-O-methylcytidine-3'-phosphate
  modified_base 13: mod_base = OTHER; note = 2'-deoxy-2'-fluorocytidine-3'-phosphate
  modified_base 14: mod_base = OTHER; note = 2'-O-methyladenosine-3'-phosphate
  modified_base 15: mod_base = OTHER; note = 2'-deoxy-2'-fluoroguanosine-3'-phosphate
  modified_base 16: mod_base = OTHER; note = 2'-O-methylcytidine-3'-phosphate
  modified_base 17: mod_base = OTHER; note = 2'-deoxy-2'-fluoroadenosine-3'-phosphate
  modified_base 18: mod_base = OTHER; note = 2'-O-methyluridine-3'-phosphate
  modified_base 19: mod_base = OTHER; note = 2'-deoxy-2'-fluoroadenosine-3'-phosphate
  modified_base 20: mod_base = OTHER; note = 2'-deoxythymidine-3'-phosphorothioate
  misc_feature 1..19: note = RNA
  misc_feature 20..21: note = DNA
tctcctagacaccagcatatt

SEQ ID NO: 278 - DNA, 21 bp, synthetic construct
  source 1..21: mol_type = other DNA
  modified_base 1: mod_base = OTHER; note = uridine-3'-phosphate
  modified_base 2: mod_base = OTHER; note = adenosine-3'-phosphate
  modified_base 3: mod_base = OTHER; note = uridine-3'-phosphate
  modified_base 4: mod_base = OTHER; note = guanosine-3'-phosphate
  modified_base 5: mod_base = OTHER; note = cytidine-3'-phosphate
  modified_base 6: mod_base = OTHER; note = 2'-O-methyluridine-3'-phosphate
  modified_base 7: mod_base = OTHER; note = 2'-O-methylguanosine-3'-phosphate
  modified_base 8: mod_base = OTHER; note = guanosine-3'-phosphate
  modified_base 9: mod_base = OTHER; note = uridine-3'-phosphate
  modified_base 10: mod_base = OTHER; note = 2'-O-methylguanosine-3'-phosphate
  modified_base 11: mod_base = OTHER; note = 2'-O-methyluridine-3'-phosphate
  modified_base 12: mod_base = OTHER; note = cytidine-3'-phosphate
  modified_base 13: mod_base = OTHER; note = uridine-3'-phosphate
  modified_base 14: mod_base = OTHER; note = adenosine-3'-phosphate
  modified_base 15: mod_base = OTHER; note = guanosine-3'-phosphate
  modified_base 16: mod_base = OTHER; note = guanosine-3'-phosphate
  modified_base 17: mod_base = OTHER; note = 2'-O-methyladenosine-3'-phosphate
  modified_base 18: mod_base = OTHER; note = 2'-O-methylguanosine-3'-phosphate
  modified_base 19: mod_base = OTHER; note = 2'-O-methyladenosine-3'-phosphate
  modified_base 20: mod_base = OTHER; note = 2'-deoxythymidine-3'-phosphorothioate
  misc_feature 1..19: note = RNA
  misc_feature 20..21: note = DNA
tatgctggtgtctaggagatt

SEQ ID NO: 279 - DNA, 21 bp, synthetic construct
  source 1..21: mol_type = other DNA
  modified_base 1: mod_base = OTHER; note = 2'-deoxy-2'-fluorouridine-3'-phosphate
  modified_base 2: mod_base = OTHER; note = 2'-deoxy-2'-fluorocytidine-3'-phosphate
  modified_base 3: mod_base = OTHER; note = 2'-deoxy-2'-fluorouridine-3'-phosphate
  modified_base 4: mod_base = OTHER; note = 2'-deoxy-2'-fluorocytidine-3'-phosphate
  modified_base 5: mod_base = OTHER; note = 2'-deoxy-2'-fluorocytidine-3'-phosphate
  modified_base 6: mod_base = OTHER; note = 2'-deoxy-2'-fluorouridine-3'-phosphate
  modified_base 7: mod_base = OTHER; note = adenosine-3'-phosphate
  modified_base 8: mod_base = OTHER; note = guanosine-3'-phosphate
  modified_base 9: mod_base = OTHER; note = adenosine-3'-phosphate
  modified_base 10: mod_base = OTHER; note = 2'-deoxy-2'-fluorocytidine-3'-phosphate
  modified_base 11: mod_base = OTHER; note = adenosine-3'-phosphate
  modified_base 12: mod_base = OTHER; note = 2'-deoxy-2'-fluorocytidine-3'-phosphate
  modified_base 13: mod_base = OTHER; note = 2'-deoxy-2'-fluorocytidine-3'-phosphate
  modified_base 14: mod_base = OTHER; note = adenosine-3'-phosphate
  modified_base 15: mod_base = OTHER; note = guanosine-3'-phosphate
  modified_base 16: mod_base = OTHER; note = 2'-deoxy-2'-fluorocytidine-3'-phosphate
  modified_base 17: mod_base = OTHER; note = adenosine-3'-phosphate
  modified_base 18: mod_base = OTHER; note = 2'-deoxy-2'-fluorouridine-3'-phosphate
  modified_base 19: mod_base = OTHER; note = adenosine-3'-phosphate
  modified_base 20: mod_base = OTHER; note = 2'-deoxythymidine-3'-phosphorothioate
  misc_feature 1..19: note = RNA
  misc_feature 20..21: note = DNA
tctcctagacaccagcatatt

SEQ ID NO: 280 - DNA, 21 bp, synthetic construct
  source 1..21: mol_type = other DNA
  modified_base 1: mod_base = OTHER; note = uridine-3'-phosphate
  modified_base 2: mod_base = OTHER; note = adenosine-3'-phosphate
  modified_base 3: mod_base = OTHER; note = uridine-3'-phosphate
  modified_base 4: mod_base = OTHER; note = guanosine-3'-phosphate
  modified_base 5: mod_base = OTHER; note = cytidine-3'-phosphate
  modified_base 6: mod_base = OTHER; note = 2'-O-methyluridine-3'-phosphate
  modified_base 7: mod_base = OTHER; note = 2'-O-methylguanosine-3'-phosphate
  modified_base 8: mod_base = OTHER; note = guanosine-3'-phosphate
  modified_base 9: mod_base = OTHER; note = uridine-3'-phosphate
  modified_base 10: mod_base = OTHER; note = 2'-O-methylguanosine-3'-phosphate
  modified_base 11: mod_base = OTHER; note = 2'-O-methyluridine-3'-phosphate
  modified_base 12: mod_base = OTHER; note = cytidine-3'-phosphate
  modified_base 13: mod_base = OTHER; note = uridine-3'-phosphate
  modified_base 14: mod_base = OTHER; note = adenosine-3'-phosphate
  modified_base 15: mod_base = OTHER; note = guanosine-3'-phosphate
  modified_base 16: mod_base = OTHER; note = guanosine-3'-phosphate
  modified_base 17: mod_base = OTHER; note = 2'-O-methyladenosine-3'-phosphate
  modified_base 18: mod_base = OTHER; note = 2'-O-methylguanosine-3'-phosphate
  modified_base 19: mod_base = OTHER; note = 2'-O-methyladenosine-3'-phosphate
  modified_base 20: mod_base = OTHER; note = 2'-deoxythymidine-3'-phosphorothioate
  misc_feature 1..19: note = RNA
  misc_feature 20..21: note = DNA
tatgctggtgtctaggagatt

SEQ ID NO: 281 - DNA, 21 bp, synthetic construct
  source 1..21: mol_type = other DNA
  modified_base 1: mod_base = OTHER; note = uridine-3'-phosphate
  modified_base 2: mod_base = OTHER; note = 2'-O-methylcytidine-3'-phosphate
  modified_base 3: mod_base = OTHER; note = uridine-3'-phosphate
  modified_base 4: mod_base = OTHER; note = 2'-O-methylcytidine-3'-phosphate
  modified_base 5: mod_base = OTHER; note = cytidine-3'-phosphate
  modified_base 6: mod_base = OTHER; note = 2'-O-methyluridine-3'-phosphate
  modified_base 7: mod_base = OTHER; note = adenosine-3'-phosphate
  modified_base 8: mod_base = OTHER; note = 2'-O-methylguanosine-3'-phosphate
  modified_base 9: mod_base = OTHER; note = adenosine-3'-phosphate
  modified_base 10: mod_base = OTHER; note = 2'-O-methylcytidine-3'-phosphate
  modified_base 11: mod_base = OTHER; note = adenosine-3'-phosphate
  modified_base 12: mod_base = OTHER; note = 2'-O-methylcytidine-3'-phosphate
  modified_base 13: mod_base = OTHER; note = cytidine-3'-phosphate
  modified_base 14: mod_base = OTHER; note = 2'-O-methyladenosine-3'-phosphate
  modified_base 15: mod_base = OTHER; note = guanosine-3'-phosphate
  modified_base 16: mod_base = OTHER; note = 2'-O-methylcytidine-3'-phosphate
  modified_base 17: mod_base = OTHER; note = adenosine-3'-phosphate
  modified_base 18: mod_base = OTHER; note = 2'-O-methyluridine-3'-phosphate
  modified_base 19: mod_base = OTHER; note = adenosine-3'-phosphate
  modified_base 20: mod_base = OTHER; note = 2'-deoxythymidine-3'-phosphorothioate
  misc_feature 1..19: note = RNA
  misc_feature 20..21: note = DNA
tctcctagacaccagcatatt

SEQ ID NO: 282 - DNA, 21 bp, synthetic construct
  source 1..21: mol_type = other DNA
  modified_base 1: mod_base = OTHER; note = uridine-3'-phosphate
  modified_base 2: mod_base = OTHER; note = adenosine-3'-phosphate
  modified_base 3: mod_base = OTHER; note = uridine-3'-phosphate
  modified_base 4: mod_base = OTHER; note = guanosine-3'-phosphate
  modified_base 5: mod_base = OTHER; note = cytidine-3'-phosphate
  modified_base 6: mod_base = OTHER; note = 2'-O-methyluridine-3'-phosphate
  modified_base 7: mod_base = OTHER; note = 2'-O-methylguanosine-3'-phosphate
  modified_base 8: mod_base = OTHER; note = guanosine-3'-phosphate
  modified_base 9: mod_base = OTHER; note = uridine-3'-phosphate
  modified_base 10: mod_base = OTHER; note = 2'-O-methylguanosine-3'-phosphate
  modified_base 11: mod_base = OTHER; note = 2'-O-methyluridine-3'-phosphate
  modified_base 12: mod_base = OTHER; note = cytidine-3'-phosphate
  modified_base 13: mod_base = OTHER; note = uridine-3'-phosphate
  modified_base 14: mod_base = OTHER; note = adenosine-3'-phosphate
  modified_base 15: mod_base = OTHER; note = guanosine-3'-phosphate
  modified_base 16: mod_base = OTHER; note = guanosine-3'-phosphate
  modified_base 17: mod_base = OTHER; note = 2'-O-methyladenosine-3'-phosphate
  modified_base 18: mod_base = OTHER; note = 2'-O-methylguanosine-3'-phosphate
  modified_base 19: mod_base = OTHER; note = 2'-O-methyladenosine-3'-phosphate
  modified_base 20: mod_base = OTHER; note = 2'-deoxythymidine-3'-phosphorothioate
  misc_feature 1..19: note = RNA
  misc_feature 20..21: note = DNA
tatgctggtgtctaggagatt

SEQ ID NO: 283 - DNA, 21 bp, synthetic construct
  source 1..21: mol_type = other DNA
  modified_base 1: mod_base = OTHER; note = 2'-deoxy-2'-fluoroadenosine-3'-phosphate
  modified_base 2: mod_base = OTHER; note = 2'-O-methylguanosine-3'-phosphate
  modified_base 3: mod_base = OTHER; note = 2'-deoxy-2'-fluoroguanosine-3'-phosphate
  modified_base 4: mod_base = OTHER; note = 2'-O-methylcytidine-3'-phosphate
  modified_base 5: mod_base = OTHER; note = 2'-deoxy-2'-fluorocytidine-3'-phosphate
  modified_base 6: mod_base = OTHER; note = 2'-O-methyluridine-3'-phosphate
  modified_base 7: mod_base = OTHER; note = 2'-deoxy-2'-fluoroguanosine-3'-phosphate
  modified_base 8: mod_base = OTHER; note = 2'-O-methylguanosine-3'-phosphate
  modified_base 9: mod_base = OTHER; note = 2'-deoxy-2'-fluoroadenosine-3'-phosphate
  modified_base 10: mod_base = OTHER; note = 2'-O-methylguanosine-3'-phosphate
  modified_base 11: mod_base = OTHER; note = 2'-deoxy-2'-fluorouridine-3'-phosphate
  modified_base 12: mod_base = OTHER; note = 2'-O-methyluridine-3'-phosphate
  modified_base 13: mod_base = OTHER; note = 2'-deoxy-2'-fluorouridine-3'-phosphate
  modified_base 14: mod_base = OTHER; note = 2'-O-methyladenosine-3'-phosphate
  modified_base 15: mod_base = OTHER; note = 2'-deoxy-2'-fluorouridine-3'-phosphate
  modified_base 16: mod_base = OTHER; note = 2'-O-methyluridine-3'-phosphate
  modified_base 17: mod_base = OTHER; note = 2'-deoxy-2'-fluorocytidine-3'-phosphate
  modified_base 18: mod_base = OTHER; note = 2'-O-methylguanosine-3'-phosphate
  modified_base 19: mod_base = OTHER; note = 2'-deoxy-2'-fluoroguanosine-3'-phosphate
  modified_base 20: mod_base = OTHER; note = 2'-deoxythymidine-3'-phosphorothioate
  misc_feature 1..19: note = RNA
  misc_feature 20..21: note = DNA
aggcctggagtttattcggtt

SEQ ID NO: 284 - DNA, 21 bp, synthetic construct
  source 1..21: mol_type = other DNA
  modified_base 1: mod_base = OTHER; note = 2'-O-methylcytidine-3'-phosphate 5'phosphate
  modified_base 2: mod_base = OTHER; note = 2'-deoxy-2'-fluorocytidine-3'-phosphate
  modified_base 3: mod_base = OTHER; note = 2'-O-methylguanosine-3'-phosphate
  modified_base 4: mod_base = OTHER; note = 2'-deoxy-2'-fluoroadenosine-3'-phosphate
  modified_base 5: mod_base = OTHER; note = 2'-O-methyladenosine-3'-phosphate
  modified_base 6: mod_base = OTHER; note = 2'-deoxy-2'-fluorouridine-3'-phosphate
  modified_base 7: mod_base = OTHER; note = 2'-O-methyladenosine-3'-phosphate
  modified_base 8: mod_base = OTHER; note = 2'-deoxy-2'-fluoroadenosine-3'-phosphate
  modified_base 9: mod_base = OTHER; note = 2'-O-methyladenosine-3'-phosphate
  modified_base 10: mod_base = OTHER; note = 2'-deoxy-2'-fluorocytidine-3'-phosphate
  modified_base 11: mod_base = OTHER; note = 2'-O-methyluridine-3'-phosphate
  modified_base 12: mod_base = OTHER; note = 2'-deoxy-2'-fluorocytidine-3'-phosphate
  modified_base 13: mod_base = OTHER; note = 2'-O-methylcytidine-3'-phosphate
  modified_base 14: mod_base = OTHER; note = 2'-deoxy-2'-fluoroadenosine-3'-phosphate
  modified_base 15: mod_base = OTHER; note = 2'-O-methylguanosine-3'-phosphate
  modified_base 16: mod_base = OTHER; note = 2'-deoxy-2'-fluoroguanosine-3'-phosphate
  modified_base 17: mod_base = OTHER; note = 2'-O-methylcytidine-3'-phosphate
  modified_base 18: mod_base = OTHER; note = 2'-deoxy-2'-fluorocytidine-3'-phosphate
  modified_base 19: mod_base = OTHER; note = 2'-O-methyluridine-3'-phosphate
  modified_base 20: mod_base = OTHER; note = 2'-deoxythymidine-3'-phosphorothioate
  misc_feature 1..19: note = RNA
  misc_feature 20..21: note = DNA
ccgaataaactccaggccttt

SEQ ID NO: 285 - DNA, 21 bp, synthetic construct
  source 1..21: mol_type = other DNA
  modified_base 1: mod_base = OTHER; note = adenosine-3'-phosphate
  modified_base 2: mod_base = OTHER; note = guanosine-3'-phosphate
  modified_base 3: mod_base = OTHER; note = guanosine-3'-phosphate
  modified_base 4: mod_base = OTHER; note = 2'-deoxy-2'-fluorocytidine-3'-phosphate
  modified_base 5: mod_base = OTHER; note = 2'-deoxy-2'-fluorocytidine-3'-phosphate
  modified_base 6: mod_base = OTHER; note = 2'-deoxy-2'-fluorouridine-3'-phosphate
  modified_base 7: mod_base = OTHER; note = guanosine-3'-phosphate
  modified_base 8: mod_base = OTHER; note = guanosine-3'-phosphate
  modified_base 9: mod_base = OTHER; note = adenosine-3'-phosphate
  modified_base 10: mod_base = OTHER; note = guanosine-3'-phosphate
  modified_base 11: mod_base = OTHER; note = 2'-deoxy-2'-fluorouridine-3'-phosphate
  modified_base 12: mod_base = OTHER; note = 2'-deoxy-2'-fluorouridine-3'-phosphate
  modified_base 13: mod_base = OTHER; note = 2'-deoxy-2'-fluorouridine-3'-phosphate
  modified_base 14: mod_base = OTHER; note = adenosine-3'-phosphate
  modified_base 15: mod_base = OTHER; note = 2'-deoxy-2'-fluorouridine-3'-phosphate
  modified_base 16: mod_base = OTHER; note = 2'-deoxy-2'-fluorouridine-3'-phosphate
  modified_base 17: mod_base = OTHER; note = 2'-deoxy-2'-fluorocytidine-3'-phosphate
  modified_base 18: mod_base = OTHER; note = guanosine-3'-phosphate
  modified_base 19: mod_base = OTHER; note = guanosine-3'-phosphate
  modified_base 20: mod_base = OTHER; note = 2'-deoxythymidine-3'-phosphorothioate
  misc_feature 1..19: note = RNA
  misc_feature 20..21: note = DNA
aggcctggagtttattcggtt

SEQ ID NO: 286 - DNA, 21 bp, synthetic construct
  source 1..21: mol_type = other DNA
  modified_base 1: mod_base = OTHER; note = 2'-deoxy-2'-fluorocytidine-3'-phosphate
  modified_base 2: mod_base = OTHER; note = 2'-deoxy-2'-fluorocytidine-3'-phosphate
  modified_base 3: mod_base = OTHER; note = guanosine-3'-phosphate
  modified_base 4: mod_base = OTHER; note = adenosine-3'-phosphate
  modified_base 5: mod_base = OTHER; note = adenosine-3'-phosphate
  modified_base 6: mod_base = OTHER; note = 2'-deoxy-2'-fluorouridine-3'-phosphate
  modified_base 7: mod_base = OTHER; note = adenosine-3'-phosphate
  modified_base 8: mod_base = OTHER; note = adenosine-3'-phosphate
  modified_base 9: mod_base = OTHER; note = adenosine-3'-phosphate
  modified_base 10: mod_base = OTHER; note = 2'-deoxy-2'-fluorocytidine-3'-phosphate
  modified_base 11: mod_base = OTHER; note = 2'-deoxy-2'-fluorouridine-3'-phosphate
  modified_base 12: mod_base = OTHER; note = 2'-deoxy-2'-fluorocytidine-3'-phosphate
  modified_base 13: mod_base = OTHER; note = 2'-deoxy-2'-fluorocytidine-3'-phosphate
  modified_base 14: mod_base = OTHER; note = adenosine-3'-phosphate
  modified_base 15: mod_base = OTHER; note = guanosine-3'-phosphate
  modified_base 16: mod_base = OTHER; note = guanosine-3'-phosphate
  modified_base 17: mod_base = OTHER; note = 2'-deoxy-2'-fluorocytidine-3'-phosphate
  modified_base 18: mod_base = OTHER; note = 2'-deoxy-2'-fluorocytidine-3'-phosphate
  modified_base 19: mod_base = OTHER; note = 2'-deoxy-2'-fluorouridine-3'-phosphate
  modified_base 20: mod_base = OTHER; note = 2'-deoxythymidine-3'-phosphorothioate
  misc_feature 1..19: note = RNA
  misc_feature 20..21: note = DNA
ccgaataaactccaggccttt

SEQ ID NO: 287 - DNA, 21 bp, synthetic construct
  source 1..21: mol_type = other DNA
  modified_base 1: mod_base = OTHER; note = adenosine-3'-phosphate
  modified_base 2: mod_base = OTHER; note = 2'-O-methylguanosine-3'-phosphate
  modified_base 3: mod_base = OTHER; note = guanosine-3'-phosphate
  modified_base 4: mod_base = OTHER; note = 2'-O-methylcytidine-3'-phosphate
  modified_base 5: mod_base = OTHER; note = cytidine-3'-phosphate
  modified_base 6: mod_base = OTHER; note = 2'-O-methyluridine-3'-phosphate
  modified_base 7: mod_base = OTHER; note = guanosine-3'-phosphate
  modified_base 8: mod_base = OTHER; note = 2'-O-methylguanosine-3'-phosphate
  modified_base 9: mod_base = OTHER; note = adenosine-3'-phosphate
  modified_base 10: mod_base = OTHER; note = 2'-O-methylguanosine-3'-phosphate
  modified_base 11: mod_base = OTHER; note = uridine-3'-phosphate
  modified_base 12: mod_base = OTHER; note = 2'-O-methyluridine-3'-phosphate
  modified_base 13: mod_base = OTHER; note = uridine-3'-phosphate
  modified_base 14: mod_base = OTHER; note = 2'-O-methyladenosine-3'-phosphate
  modified_base 15: mod_base = OTHER; note = uridine-3'-phosphate
  modified_base 16: mod_base = OTHER; note = 2'-O-methyluridine-3'-phosphate
  modified_base 17: mod_base = OTHER; note = cytidine-3'-phosphate
  modified_base 18: mod_base = OTHER; note = 2'-O-methylguanosine-3'-phosphate
  modified_base 19: mod_base = OTHER; note = guanosine-3'-phosphate
  modified_base 20: mod_base = OTHER; note = 2'-deoxythymidine-3'-phosphorothioate
  misc_feature 1..19: note = RNA
  misc_feature 20..21: note = DNA
aggcctggagtttattcggtt

SEQ ID NO: 288 - DNA, 21 bp, synthetic construct
  source 1..21: mol_type = other DNA
  modified_base 1: mod_base = OTHER; note = 2'-O-methylcytidine-3'-phosphate 5'phosphate
  modified_base 2: mod_base = OTHER; note = 2'-deoxy-2'-fluorocytidine-3'-phosphate
  modified_base 3: mod_base = OTHER; note = 2'-O-methylguanosine-3'-phosphate
  modified_base 4: mod_base = OTHER; note = 2'-deoxy-2'-fluoroadenosine-3'-phosphate
  modified_base 5: mod_base = OTHER; note = 2'-O-methyladenosine-3'-phosphate
  modified_base 6: mod_base = OTHER; note = 2'-deoxy-2'-fluorouridine-3'-phosphate
  modified_base 7: mod_base = OTHER; note = 2'-O-methyladenosine-3'-phosphate
  modified_base 8: mod_base = OTHER; note = 2'-deoxy-2'-fluoroadenosine-3'-phosphate
  modified_base 9: mod_base = OTHER; note = 2'-O-methyladenosine-3'-phosphate
  modified_base 10: mod_base = OTHER; note = 2'-deoxy-2'-fluorocytidine-3'-phosphate
  modified_base 11: mod_base = OTHER; note = 2'-O-methyluridine-3'-phosphate
  modified_base 12: mod_base = OTHER; note = 2'-deoxy-2'-fluorocytidine-3'-phosphate
  modified_base 13: mod_base = OTHER; note = 2'-O-methylcytidine-3'-phosphate
  modified_base 14: mod_base = OTHER; note = 2'-deoxy-2'-fluoroadenosine-3'-phosphate
  modified_base 15: mod_base = OTHER; note = 2'-O-methylguanosine-3'-phosphate
  modified_base 16: mod_base = OTHER; note = 2'-deoxy-2'-fluoroguanosine-3'-phosphate
  modified_base 17: mod_base = OTHER; note = 2'-O-methylcytidine-3'-phosphate
  modified_base 18: mod_base = OTHER; note = 2'-deoxy-2'-fluorocytidine-3'-phosphate
  modified_base 19: mod_base = OTHER; note = 2'-O-methyluridine-3'-phosphate
  modified_base 20: mod_base = OTHER; note = 2'-deoxythymidine-3'-phosphorothioate
  misc_feature 1..19: note = RNA
  misc_feature 20..21: note = DNA
ccgaataaactccaggccttt

SEQ ID NO: 289 - DNA, 21 bp, synthetic construct
  source 1..21: mol_type = other DNA
  modified_base 1: mod_base = OTHER; note = adenosine-3'-phosphate
  modified_base 2: mod_base = OTHER; note = 2'-O-methylguanosine-3'-phosphate
  modified_base 3: mod_base = OTHER; note = guanosine-3'-phosphate
  modified_base 4: mod_base = OTHER; note = 2'-O-methylcytidine-3'-phosphate
  modified_base 5: mod_base = OTHER; note = cytidine-3'-phosphate
  modified_base 6: mod_base = OTHER; note = 2'-O-methyluridine-3'-phosphate
  modified_base 7: mod_base = OTHER; note = guanosine-3'-phosphate
  modified_base 8: mod_base = OTHER; note = 2'-O-methylguanosine-3'-phosphate
  modified_base 9: mod_base = OTHER; note = adenosine-3'-phosphate
  modified_base 10: mod_base = OTHER; note = 2'-O-methylguanosine-3'-phosphate
  modified_base 11: mod_base = OTHER; note = uridine-3'-phosphate
  modified_base 12: mod_base = OTHER; note = 2'-O-methyluridine-3'-phosphate
  modified_base 13: mod_base = OTHER; note = uridine-3'-phosphate
  modified_base 14: mod_base = OTHER; note = 2'-O-methyladenosine-3'-phosphate
  modified_base 15: mod_base = OTHER; note = uridine-3'-phosphate
  modified_base 16: mod_base = OTHER; note = 2'-O-methyluridine-3'-phosphate
  modified_base 17: mod_base = OTHER; note = cytidine-3'-phosphate
  modified_base 18: mod_base = OTHER; note = 2'-O-methylguanosine-3'-phosphate
  modified_base 19: mod_base = OTHER; note = guanosine-3'-phosphate
  modified_base 20: mod_base = OTHER; note = 2'-deoxythymidine-3'-phosphorothioate
  misc_feature 1..19: note = RNA
  misc_feature 20..21: note = DNA
aggcctggagtttattcggtt

SEQ ID NO: 290 - DNA, 21 bp, synthetic construct
  source 1..21: mol_type = other DNA
  modified_base 1: mod_base = OTHER; note = 2'-deoxy-2'-fluorocytidine-3'-phosphate
  modified_base 2: mod_base = OTHER; note = 2'-deoxy-2'-fluorocytidine-3'-phosphate
  modified_base 3: mod_base = OTHER; note = guanosine-3'-phosphate
  modified_base 4: mod_base = OTHER; note = adenosine-3'-phosphate
  modified_base 5: mod_base = OTHER; note = adenosine-3'-phosphate
  modified_base 6: mod_base = OTHER; note = 2'-deoxy-2'-fluorouridine-3'-phosphate
  modified_base 7: mod_base = OTHER; note = adenosine-3'-phosphate
  modified_base 8: mod_base = OTHER; note = adenosine-3'-phosphate
  modified_base 9: mod_base = OTHER; note = adenosine-3'-phosphate
  modified_base 10: mod_base = OTHER; note = 2'-deoxy-2'-fluorocytidine-3'-phosphate
  modified_base 11: mod_base = OTHER; note = 2'-deoxy-2'-fluorouridine-3'-phosphate
  modified_base 12: mod_base = OTHER; note = 2'-deoxy-2'-fluorocytidine-3'-phosphate
  modified_base 13: mod_base = OTHER; note = 2'-deoxy-2'-fluorocytidine-3'-phosphate
  modified_base 14: mod_base = OTHER; note = adenosine-3'-phosphate
  modified_base 15: mod_base = OTHER; note = guanosine-3'-phosphate
  modified_base 16: mod_base = OTHER; note = guanosine-3'-phosphate
  modified_base 17: mod_base = OTHER; note = 2'-deoxy-2'-fluorocytidine-3'-phosphate
  modified_base 18: mod_base = OTHER; note = 2'-deoxy-2'-fluorocytidine-3'-phosphate
  modified_base 19: mod_base = OTHER; note = 2'-deoxy-2'-fluorouridine-3'-phosphate
  modified_base 20: mod_base = OTHER; note = 2'-deoxythymidine-3'-phosphorothioate
  misc_feature 1..19: note = RNA
  misc_feature 20..21: note = DNA
ccgaataaactccaggccttt

SEQ ID NO: 291 - DNA, 21 bp, synthetic construct
  source 1..21: mol_type = other DNA
  modified_base 1: mod_base = OTHER; note = 2'-deoxy-2'-fluoroadenosine-3'-phosphate
  modified_base 2: mod_base = OTHER; note = 2'-O-methylguanosine-3'-phosphate
  modified_base 3: mod_base = OTHER; note = 2'-deoxy-2'-fluoroguanosine-3'-phosphate
  modified_base 4: mod_base = OTHER; note = 2'-O-methylcytidine-3'-phosphate
  modified_base 5: mod_base = OTHER; note = 2'-deoxy-2'-fluorocytidine-3'-phosphate
  modified_base 6: mod_base = OTHER; note = 2'-O-methyluridine-3'-phosphate
  modified_base 7: mod_base = OTHER; note = 2'-deoxy-2'-fluoroguanosine-3'-phosphate
  modified_base 8: mod_base = OTHER; note = 2'-O-methylguanosine-3'-phosphate
  modified_base 9: mod_base = OTHER; note = 2'-deoxy-2'-fluoroadenosine-3'-phosphate
  modified_base 10: mod_base = OTHER; note = 2'-O-methylguanosine-3'-phosphate
  modified_base 11: mod_base = OTHER; note = 2'-deoxy-2'-fluorouridine-3'-phosphate
  modified_base 12: mod_base = OTHER; note = 2'-O-methyluridine-3'-phosphate
  modified_base 13: mod_base = OTHER; note = 2'-deoxy-2'-fluorouridine-3'-phosphate
  modified_base 14: mod_base = OTHER; note = 2'-O-methyladenosine-3'-phosphate
  modified_base 15: mod_base = OTHER; note = 2'-deoxy-2'-fluorouridine-3'-phosphate
  modified_base 16: mod_base = OTHER; note = 2'-O-methyluridine-3'-phosphate
  modified_base 17: mod_base = OTHER; note = 2'-deoxy-2'-fluorocytidine-3'-phosphate
  modified_base 18: mod_base = OTHER; note = 2'-O-methylguanosine-3'-phosphate
  modified_base 19: mod_base = OTHER; note = 2'-deoxy-2'-fluoroguanosine-3'-phosphate
  modified_base 20: mod_base = OTHER; note = 2'-deoxythymidine-3'-phosphorothioate
  misc_feature 1..19: note = RNA
  misc_feature 20..21: note = DNA
aggcctggagtttattcggtt

SEQ ID NO: 292 - DNA, 21 bp, synthetic construct
  source 1..21: mol_type = other DNA
  modified_base 1: mod_base = OTHER; note = cytidine-3'-phosphate
  modified_base 2: mod_base = OTHER; note = cytidine-3'-phosphate
  modified_base 3: mod_base = OTHER; note = guanosine-3'-phosphate
  modified_base 4: mod_base = OTHER; note = adenosine-3'-phosphate
  modified_base 5: mod_base = OTHER; note = adenosine-3'-phosphate
  modified_base 6: mod_base = OTHER; note = 2'-O-methyluridine-3'-phosphate
  modified_base 7: mod_base = OTHER; note = 2'-O-methyladenosine-3'-phosphate
  modified_base 8: mod_base = OTHER; note = adenosine-3'-phosphate
  modified_base 9: mod_base = OTHER; note = adenosine-3'-phosphate
  modified_base 10: mod_base = OTHER; note = 2'-O-methylcytidine-3'-phosphate
  modified_base 11: mod_base = OTHER; note = 2'-O-methyluridine-3'-phosphate
  modified_base 12: mod_base = OTHER; note = cytidine-3'-phosphate
  modified_base 13: mod_base = OTHER; note = cytidine-3'-phosphate
  modified_base 14: mod_base = OTHER; note = adenosine-3'-phosphate
  modified_base 15: mod_base = OTHER; note = guanosine-3'-phosphate
  modified_base 16: mod_base = OTHER; note = guanosine-3'-phosphate
  modified_base 17: mod_base = OTHER; note = 2'-O-methylcytidine-3'-phosphate
  modified_base 18: mod_base = OTHER; note = 2'-O-methylcytidine-3'-phosphate
  modified_base 19: mod_base = OTHER; note = 2'-O-methyluridine-3'-phosphate
  modified_base 20: mod_base = OTHER; note = 2'-deoxythymidine-3'-phosphorothioate
  misc_feature 1..19: note = RNA
  misc_feature 20..21: note = DNA
ccgaataaactccaggccttt

SEQ ID NO: 293 - DNA, 21 bp, synthetic construct
  source 1..21: mol_type = other DNA
  modified_base 1: mod_base = OTHER; note = adenosine-3'-phosphate
  modified_base 2: mod_base = OTHER; note = guanosine-3'-phosphate
  modified_base 3: mod_base = OTHER; note = guanosine-3'-phosphate
  modified_base 4: mod_base = OTHER; note = 2'-deoxy-2'-fluorocytidine-3'-phosphate
  modified_base 5: mod_base = OTHER; note = 2'-deoxy-2'-fluorocytidine-3'-phosphate
  modified_base 6: mod_base = OTHER; note = 2'-deoxy-2'-fluorouridine-3'-phosphate
  modified_base 7: mod_base = OTHER; note = guanosine-3'-phosphate
  modified_base 8: mod_base = OTHER; note = guanosine-3'-phosphate
  modified_base 9: mod_base = OTHER; note = adenosine-3'-phosphate
  modified_base 10: mod_base = OTHER; note = guanosine-3'-phosphate
  modified_base 11: mod_base = OTHER; note = 2'-deoxy-2'-fluorouridine-3'-phosphate
  modified_base 12: mod_base = OTHER; note = 2'-deoxy-2'-fluorouridine-3'-phosphate
  modified_base 13: mod_base = OTHER; note = 2'-deoxy-2'-fluorouridine-3'-phosphate
  modified_base 14: mod_base = OTHER; note = adenosine-3'-phosphate
  modified_base 15: mod_base = OTHER; note = 2'-deoxy-2'-fluorouridine-3'-phosphate
  modified_base 16: mod_base = OTHER; note = 2'-deoxy-2'-fluorouridine-3'-phosphate
  modified_base 17: mod_base = OTHER; note = 2'-deoxy-2'-fluorocytidine-3'-phosphate
  modified_base 18: mod_base = OTHER; note = guanosine-3'-phosphate
  modified_base 19: mod_base = OTHER; note = guanosine-3'-phosphate
  modified_base 20: mod_base = OTHER; note = 2'-deoxythymidine-3'-phosphorothioate
  misc_feature 1..19: note = RNA
  misc_feature 20..21: note = DNA
aggcctggagtttattcggtt

SEQ ID NO: 294 - DNA, 21 bp, synthetic construct
  source 1..21: mol_type = other DNA
  modified_base 1: mod_base = OTHER; note = cytidine-3'-phosphate
  modified_base 2: mod_base = OTHER; note = cytidine-3'-phosphate
  modified_base 3: mod_base = OTHER; note = guanosine-3'-phosphate
  modified_base 4: mod_base = OTHER; note = adenosine-3'-phosphate
  modified_base 5: mod_base = OTHER; note = adenosine-3'-phosphate
  modified_base 6: mod_base = OTHER; note = 2'-O-methyluridine-3'-phosphate
  modified_base 7: mod_base = OTHER; note = 2'-O-methyladenosine-3'-phosphate
  modified_base 8: mod_base = OTHER; note = adenosine-3'-phosphate
  modified_base 9: mod_base = OTHER; note = adenosine-3'-phosphate
  modified_base 10: mod_base = OTHER; note = 2'-O-methylcytidine-3'-phosphate
  modified_base 11: mod_base = OTHER; note = 2'-O-methyluridine-3'-phosphate
  modified_base 12: mod_base = OTHER; note = cytidine-3'-phosphate
  modified_base 13: mod_base = OTHER; note = cytidine-3'-phosphate
  modified_base 14: mod_base = OTHER; note = adenosine-3'-phosphate
  modified_base 15: mod_base = OTHER; note = guanosine-3'-phosphate
  modified_base 16: mod_base = OTHER; note = guanosine-3'-phosphate
  modified_base 17: mod_base = OTHER; note = 2'-O-methylcytidine-3'-phosphate
  modified_base 18: mod_base = OTHER; note = 2'-O-methylcytidine-3'-phosphate
  modified_base 19: mod_base = OTHER; note = 2'-O-methyluridine-3'-phosphate
  modified_base 20: mod_base = OTHER; note = 2'-deoxythymidine-3'-phosphorothioate
  misc_feature 1..19: note = RNA
  misc_feature 20..21: note = DNA
ccgaataaactccaggccttt

SEQ ID NO: 295 - DNA, 21 bp, synthetic construct
  source 1..21: mol_type = other DNA
  modified_base 1: mod_base = OTHER; note = adenosine-3'-phosphate
  modified_base 2: mod_base = OTHER; note = 2'-O-methylguanosine-3'-phosphate
  modified_base 3: mod_base = OTHER; note = guanosine-3'-phosphate
  modified_base 4: mod_base = OTHER; note = 2'-O-methylcytidine-3'-phosphate
  modified_base 5: mod_base = OTHER; note = cytidine-3'-phosphate
  modified_base 6: mod_base = OTHER; note = 2'-O-methyluridine-3'-phosphate
  modified_base 7: mod_base = OTHER; note = guanosine-3'-phosphate
  modified_base 8: mod_base = OTHER; note = 2'-O-methylguanosine-3'-phosphate
  modified_base 9: mod_base = OTHER; note = adenosine-3'-phosphate
  modified_base 10: mod_base = OTHER; note = 2'-O-methylguanosine-3'-phosphate
  modified_base 11: mod_base = OTHER; note = uridine-3'-phosphate
  modified_base 12: mod_base = OTHER; note = 2'-O-methyluridine-3'-phosphate
  modified_base 13: mod_base = OTHER; note = uridine-3'-phosphate
  modified_base 14: mod_base = OTHER; note = 2'-O-methyladenosine-3'-phosphate
  modified_base 15: mod_base = OTHER; note = uridine-3'-phosphate
  modified_base 16: mod_base = OTHER; note = 2'-O-methyluridine-3'-phosphate
  modified_base 17: mod_base = OTHER; note = cytidine-3'-phosphate
  modified_base 18: mod_base = OTHER; note = 2'-O-methylguanosine-3'-phosphate
  modified_base 19: mod_base = OTHER; note = guanosine-3'-phosphate
  modified_base 20: mod_base = OTHER; note = 2'-deoxythymidine-3'-phosphorothioate
  misc_feature 1..19: note = RNA
  misc_feature 20..21: note = DNA
aggcctggagtttattcggtt

SEQ ID NO: 296 - DNA, 21 bp, synthetic construct
  source 1..21: mol_type = other DNA
  modified_base 1: mod_base = OTHER; note = cytidine-3'-phosphate
  modified_base 2: mod_base = OTHER; note = cytidine-3'-phosphate
  modified_base 3: mod_base = OTHER; note = guanosine-3'-phosphate
  modified_base 4: mod_base = OTHER; note = adenosine-3'-phosphate
  modified_base 5: mod_base = OTHER; note = adenosine-3'-phosphate
  modified_base 6: mod_base = OTHER; note = 2'-O-methyluridine-3'-phosphate
  modified_base 7: mod_base = OTHER; note = 2'-O-methyladenosine-3'-phosphate
  modified_base 8: mod_base = OTHER; note = adenosine-3'-phosphate
  modified_base 9: mod_base = OTHER; note = adenosine-3'-phosphate
  modified_base 10: mod_base = OTHER; note = 2'-O-methylcytidine-3'-phosphate
  modified_base 11: mod_base = OTHER; note = 2'-O-methyluridine-3'-phosphate
  modified_base 12: mod_base = OTHER; note = cytidine-3'-phosphate
  modified_base 13: mod_base = OTHER; note = cytidine-3'-phosphate
  modified_base 14: mod_base = OTHER; note = adenosine-3'-phosphate
  modified_base 15: mod_base = OTHER; note = guanosine-3'-phosphate
  modified_base 16: mod_base = OTHER; note = guanosine-3'-phosphate
  modified_base 17: mod_base = OTHER; note = 2'-O-methylcytidine-3'-phosphate
  modified_base 18: mod_base = OTHER; note = 2'-O-methylcytidine-3'-phosphate
  modified_base 19: mod_base = OTHER; note = 2'-O-methyluridine-3'-phosphate
  modified_base 20: mod_base = OTHER; note = 2'-deoxythymidine-3'-phosphorothioate
  misc_feature 1..19: note = RNA
  misc_feature 20..21: note = DNA
ccgaataaactccaggccttt

SEQ ID NO: 297 - DNA, 21 bp, synthetic construct
  source 1..21: mol_type = other DNA
  modified_base 1: mod_base = OTHER; note = cytidine-3'-phosphate
  modified_base 2: mod_base = OTHER; note = uridine-3'-phosphate
  modified_base 3: mod_base = OTHER; note = cytidine-3'-phosphate
  modified_base 4: mod_base = OTHER; note = cytidine-3'-phosphate
  modified_base 5: mod_base = OTHER; note = uridine-3'-phosphate
  modified_base 6: mod_base = OTHER; note = adenosine-3'-phosphate
  modified_base 7: mod_base = OTHER; note = guanosine-3'-phosphate
  modified_base 8: mod_base = OTHER; note = adenosine-3'-phosphate
  modified_base 9: mod_base = OTHER; note = cytidine-3'-phosphate
  modified_base 10: mod_base = OTHER; note = adenosine-3'-phosphate
  modified_base 11: mod_base = OTHER; note = cytidine-3'-phosphate
  modified_base 12: mod_base = OTHER; note = cytidine-3'-phosphate
  modified_base 13: mod_base = OTHER; note = adenosine-3'-phosphate
  modified_base 14: mod_base = OTHER; note = guanosine-3'-phosphate
  modified_base 15: mod_base = OTHER; note = cytidine-3'-phosphate
  modified_base 16: mod_base = OTHER; note = adenosine-3'-phosphate
  modified_base 17: mod_base = OTHER; note = uridine-3'-phosphate
  modified_base 18: mod_base = OTHER; note = adenosine-3'-phosphate
  modified_base 19: mod_base = OTHER; note = cytidine-3'-phosphate
  modified_base 20: mod_base = OTHER; note = 2'-deoxythymidine-3'-phosphorothioate
  misc_feature 1..19: note = RNA
  misc_feature 20..21: note = DNA
ctcctagacaccagcatactt

SEQ ID NO: 298 - DNA, 21 bp, synthetic construct
  source 1..21: mol_type = other DNA
  modified_base 1: mod_base = OTHER; note = guanosine-3'-phosphate
  modified_base 2: mod_base = OTHER; note = uridine-3'-phosphate
  modified_base 3: mod_base = OTHER; note = adenosine-3'-phosphate
  modified_base 4: mod_base = OTHER; note = uridine-3'-phosphate
  modified_base 5: mod_base = OTHER; note = guanosine-3'-phosphate
  modified_base 6: mod_base = OTHER; note = cytidine-3'-phosphate
  modified_base 7: mod_base = OTHER; note = uridine-3'-phosphate
  modified_base 8: mod_base = OTHER; note = guanosine-3'-phosphate
  modified_base 9: mod_base = OTHER; note = guanosine-3'-phosphate
  modified_base 10: mod_base = OTHER; note = uridine-3'-phosphate
  modified_base 11: mod_base = OTHER; note = guanosine-3'-phosphate
  modified_base 12: mod_base = OTHER; note = uridine-3'-phosphate
  modified_base 13: mod_base = OTHER; note = cytidine-3'-phosphate
  modified_base 14: mod_base = OTHER; note = uridine-3'-phosphate
  modified_base 15: mod_base = OTHER; note = adenosine-3'-phosphate
  modified_base 16: mod_base = OTHER; note = guanosine-3'-phosphate
  modified_base 17: mod_base = OTHER; note = guanosine-3'-phosphate
  modified_base 18: mod_base = OTHER; note = adenosine-3'-phosphate
  modified_base 19: mod_base = OTHER; note = guanosine-3'-phosphate
  modified_base 20: mod_base = OTHER; note = 2'-deoxythymidine-3'-phosphorothioate
  misc_feature 1..19: note = RNA
  misc_feature 20..21: note = DNA
gtatgctggtgtctaggagtt

SEQ ID NO: 299 - DNA, 21 bp, synthetic construct
  source 1..21: mol_type = other DNA
  modified_base 1: mod_base = OTHER; note = 2'-O-methylcytidine-3'-phosphate
  modified_base 2: mod_base = OTHER; note = 2'-O-methyluridine-3'-phosphate
  modified_base 3: mod_base = OTHER; note = 2'-O-methylcytidine-3'-phosphate
  modified_base 4: mod_base = OTHER; note = 2'-O-methylcytidine-3'-phosphate
  modified_base 5: mod_base = OTHER; note = 2'-O-methyluridine-3'-phosphate
  modified_base 6: mod_base = OTHER; note = adenosine-3'-phosphate
  modified_base 7: mod_base = OTHER; note = guanosine-3'-phosphate
  modified_base 8: mod_base = OTHER; note = adenosine-3'-phosphate
  modified_base 9: mod_base = OTHER; note = 2'-O-methylcytidine-3'-phosphate
  modified_base 10: mod_base = OTHER; note = adenosine-3'-phosphate
  modified_base 11: mod_base = OTHER; note = 2'-O-methylcytidine-3'-phosphate
  modified_base 12: mod_base = OTHER; note = 2'-O-methylcytidine-3'-phosphate
  modified_base 13: mod_base = OTHER; note = adenosine-3'-phosphate
  modified_base 14: mod_base = OTHER; note = guanosine-3'-phosphate
  modified_base 15: mod_base = OTHER; note = 2'-O-methylcytidine-3'-phosphate
  modified_base 16: mod_base = OTHER; note = adenosine-3'-phosphate
  modified_base 17: mod_base = OTHER; note = 2'-O-methyluridine-3'-phosphate
  modified_base 18: mod_base = OTHER; note = adenosine-3'-phosphate
  modified_base 19: mod_base = OTHER; note = 2'-O-methylcytidine-3'-phosphate
  modified_base 20: mod_base = OTHER; note = 2'-deoxythymidine-3'-phosphorothioate
  misc_feature 1..19: note = RNA
  misc_feature 20..21: note = DNA
ctcctagacaccagcatactt

SEQ ID NO: 300 - DNA, 21 bp, synthetic construct
  source 1..21: mol_type = other DNA
  modified_base 1: mod_base = OTHER; note = guanosine-3'-phosphate
  modified_base 2: mod_base = OTHER; note = 2'-O-methyluridine-3'-phosphate
  modified_base 3: mod_base = OTHER; note = adenosine-3'-phosphate
  modified_base 4: mod_base = OTHER; note = uridine-3'-phosphate
  modified_base 5: mod_base = OTHER; note = guanosine-3'-phosphate
  modified_base 6: mod_base = OTHER; note = cytidine-3'-phosphate
  modified_base 7: mod_base = OTHER; note = uridine-3'-phosphate
  modified_base 8: mod_base = OTHER; note = guanosine-3'-phosphate
  modified_base 9: mod_base = OTHER; note = guanosine-3'-phosphate
  modified_base 10: mod_base = OTHER; note = uridine-3'-phosphate
  modified_base 11: mod_base = OTHER; note = guanosine-3'-phosphate
  modified_base 12: mod_base = OTHER; note = uridine-3'-phosphate
  modified_base 13: mod_base = OTHER; note = cytidine-3'-phosphate
  modified_base 14: mod_base = OTHER; note = 2'-O-methyluridine-3'-phosphate
  modified_base 15: mod_base = OTHER; note = adenosine-3'-phosphate
  modified_base 16: mod_base = OTHER; note = guanosine-3'-phosphate
  modified_base 17: mod_base = OTHER; note = guanosine-3'-phosphate
  modified_base 18: mod_base = OTHER; note = adenosine-3'-phosphate
  modified_base 19: mod_base = OTHER; note = guanosine-3'-phosphate
  modified_base 20: mod_base = OTHER; note = 2'-deoxythymidine-3'-phosphorothioate
  misc_feature 1..19: note = RNA
  misc_feature 20..21: note = DNA
gtatgctggtgtctaggagtt

SEQ ID NO: 301 - DNA, 21 bp, synthetic construct
  source 1..21: mol_type = other DNA
  modified_base 1: mod_base = OTHER; note = uridine-3'-phosphate
  modified_base 2: mod_base = OTHER; note = cytidine-3'-phosphate
  modified_base 3: mod_base = OTHER; note = cytidine-3'-phosphate
  modified_base 4: mod_base = OTHER; note = uridine-3'-phosphate
  modified_base 5: mod_base = OTHER; note = adenosine-3'-phosphate
  modified_base 6: mod_base = OTHER; note = guanosine-3'-phosphate
  modified_base 7: mod_base = OTHER; note = adenosine-3'-phosphate
  modified_base 8: mod_base = OTHER; note = cytidine-3'-phosphate
  modified_base 9: mod_base = OTHER; note = adenosine-3'-phosphate
  modified_base 10: mod_base = OTHER; note = cytidine-3'-phosphate
  modified_base 11: mod_base = OTHER; note = cytidine-3'-phosphate
  modified_base 12: mod_base = OTHER; note = adenosine-3'-phosphate
  modified_base 13: mod_base = OTHER; note = guanosine-3'-phosphate
  modified_base 14: mod_base = OTHER; note = cytidine-3'-phosphate
  modified_base 15: mod_base = OTHER; note = adenosine-3'-phosphate
  modified_base 16: mod_base = OTHER; note = uridine-3'-phosphate
  modified_base 17: mod_base = OTHER; note = adenosine-3'-phosphate
  modified_base 18: mod_base = OTHER; note = cytidine-3'-phosphate
  modified_base 19: mod_base = OTHER; note = adenosine-3'-phosphate
  modified_base 20: mod_base = OTHER; note = 2'-deoxythymidine-3'-phosphorothioate
  misc_feature 1..19: note = RNA
  misc_feature 20..21: note = DNA
tcctagacaccagcatacatt

SEQ ID NO: 302 - DNA, 21 bp, synthetic construct
  source 1..21: mol_type = other DNA
  modified_base 1: mod_base = OTHER; note = uridine-3'-phosphate
  modified_base 2: mod_base = OTHER; note = guanosine-3'-phosphate
  modified_base 3: mod_base = OTHER; note = uridine-3'-phosphate
  modified_base 4: mod_base = OTHER; note = adenosine-3'-phosphate
  modified_base 5: mod_base = OTHER; note = uridine-3'-phosphate
  modified_base 6: mod_base = OTHER; note = guanosine-3'-phosphate
  modified_base 7: mod_base = OTHER; note = cytidine-3'-phosphate
  modified_base 8: mod_base = OTHER; note = uridine-3'-phosphate
  modified_base 9: mod_base = OTHER; note = guanosine-3'-phosphate
  modified_base 10: mod_base = OTHER; note = guanosine-3'-phosphate
  modified_base 11: mod_base = OTHER; note = uridine-3'-phosphate
  modified_base 12: mod_base = OTHER; note = guanosine-3'-phosphate
  modified_base 13: mod_base = OTHER; note = uridine-3'-phosphate
  modified_base 14: mod_base = OTHER; note = cytidine-3'-phosphate
  modified_base 15: mod_base = OTHER; note = uridine-3'-phosphate
  modified_base 16: mod_base = OTHER; note = adenosine-3'-phosphate
  modified_base 17: mod_base = OTHER; note = guanosine-3'-phosphate
  modified_base 18: mod_base = OTHER; note = guanosine-3'-phosphate
  modified_base 19: mod_base = OTHER; note = adenosine-3'-phosphate
  modified_base 20: mod_base = OTHER; note = 2'-deoxythymidine-3'-phosphorothioate
  misc_feature 1..19: note = RNA
  misc_feature 20..21: note = DNA
tgtatgctggtgtctaggatt

SEQ ID NO: 303 - DNA, 21 bp, synthetic construct
  source 1..21: mol_type = other DNA
  modified_base 1: mod_base = OTHER; note = 2'-O-methyluridine-3'-phosphate
  modified_base 2: mod_base = OTHER; note = 2'-O-methylcytidine-3'-phosphate
  modified_base 3: mod_base = OTHER; note = 2'-O-methylcytidine-3'-phosphate
  modified_base 4: mod_base = OTHER; note = 2'-O-methyluridine-3'-phosphate
  modified_base 5: mod_base = OTHER; note = adenosine-3'-phosphate
  modified_base 6: mod_base = OTHER; note = guanosine-3'-phosphate
  modified_base 7: mod_base = OTHER; note = adenosine-3'-phosphate
  modified_base 8: mod_base = OTHER; note = 2'-O-methylcytidine-3'-phosphate
  modified_base 9: mod_base = OTHER; note = adenosine-3'-phosphate
  modified_base 10: mod_base = OTHER; note = 2'-O-methylcytidine-3'-phosphate
  modified_base 11: mod_base = OTHER; note = 2'-O-methylcytidine-3'-phosphate
  modified_base 12: mod_base = OTHER; note = adenosine-3'-phosphate
  modified_base 13: mod_base = OTHER; note = guanosine-3'-phosphate
  modified_base 14: mod_base = OTHER; note = 2'-O-methylcytidine-3'-phosphate
  modified_base 15: mod_base = OTHER; note = adenosine-3'-phosphate
  modified_base 16: mod_base = OTHER; note = 2'-O-methyluridine-3'-phosphate
  modified_base 17: mod_base = OTHER; note = adenosine-3'-phosphate
  modified_base 18: mod_base = OTHER; note = 2'-O-methylcytidine-3'-phosphate
  modified_base 19: mod_base = OTHER; note = adenosine-3'-phosphate
  modified_base 20: mod_base = OTHER; note = 2'-deoxythymidine-3'-phosphorothioate
  misc_feature 1..19: note = RNA
  misc_feature 20..21: note = DNA
tcctagacaccagcatacatt

SEQ ID NO: 304 - DNA, 21 bp, synthetic construct
  source 1..21: mol_type = other DNA
  modified_base 1: mod_base = OTHER; note = uridine-3'-phosphate
  modified_base 2: mod_base = OTHER; note = guanosine-3'-phosphate
  modified_base 3: mod_base = OTHER; note = 2'-O-methyluridine-3'-phosphate
  modified_base 4: mod_base = OTHER; note = adenosine-3'-phosphate
  modified_base 5: mod_base = OTHER; note = uridine-3'-phosphate
  modified_base 6: mod_base = OTHER; note = guanosine-3'-phosphate
  modified_base 7: mod_base = OTHER; note = cytidine-3'-phosphate
  modified_base 8: mod_base = OTHER; note = uridine-3'-phosphate
  modified_base 9: mod_base = OTHER; note = guanosine-3'-phosphate
  modified_base 10: mod_base = OTHER; note = guanosine-3'-phosphate
  modified_base 11: mod_base = OTHER; note = uridine-3'-phosphate
  modified_base 12: mod_base = OTHER; note = guanosine-3'-phosphate
  modified_base 13: mod_base = OTHER; note = uridine-3'-phosphate
  modified_base 14: mod_base = OTHER; note = cytidine-3'-phosphate
  modified_base 15: mod_base = OTHER; note = 2'-O-methyluridine-3'-phosphate
  modified_base 16: mod_base = OTHER; note = adenosine-3'-phosphate
  modified_base 17: mod_base = OTHER; note = guanosine-3'-phosphate
  modified_base 18: mod_base = OTHER; note = guanosine-3'-phosphate
  modified_base 19: mod_base = OTHER; note = adenosine-3'-phosphate
  modified_base 20: mod_base = OTHER; note = 2'-deoxythymidine-3'-phosphorothioate
  misc_feature 1..19: note = RNA
  misc_feature 20..21: note = DNA
tgtatgctggtgtctaggatt

SEQ ID NO: 305 - DNA, 21 bp, synthetic construct
  source 1..21: mol_type = other DNA
  modified_base 1: mod_base = OTHER; note = cytidine-3'-phosphate
  modified_base 2: mod_base = OTHER; note = cytidine-3'-phosphate
  modified_base 3: mod_base = OTHER; note = uridine-3'-phosphate
  modified_base 4: mod_base = OTHER; note = adenosine-3'-phosphate
  modified_base 5: mod_base = OTHER; note = guanosine-3'-phosphate
  modified_base 6: mod_base = OTHER; note = adenosine-3'-phosphate
  modified_base 7: mod_base = OTHER; note = cytidine-3'-phosphate
  modified_base 8: mod_base = OTHER; note = adenosine-3'-phosphate
  modified_base 9: mod_base = OTHER; note = cytidine-3'-phosphate
  modified_base 10: mod_base = OTHER; note = cytidine-3'-phosphate
  modified_base 11: mod_base = OTHER; note = adenosine-3'-phosphate
  modified_base 12: mod_base = OTHER; note = guanosine-3'-phosphate
  modified_base 13: mod_base = OTHER; note = cytidine-3'-phosphate
  modified_base 14: mod_base = OTHER; note = adenosine-3'-phosphate
  modified_base 15: mod_base = OTHER; note = uridine-3'-phosphate
  modified_base 16: mod_base = OTHER; note = adenosine-3'-phosphate
  modified_base 17: mod_base = OTHER; note = cytidine-3'-phosphate
  modified_base 18: mod_base = OTHER; note = adenosine-3'-phosphate
  modified_base 19: mod_base = OTHER; note = guanosine-3'-phosphate
  modified_base 20: mod_base = OTHER; note = 2'-deoxythymidine-3'-phosphorothioate
  misc_feature 1..19: note = RNA
  misc_feature 20..21: note = DNA
cctagacaccagcatacagtt

SEQ ID NO: 306 - DNA, 21 bp, synthetic construct
  source 1..21: mol_type = other DNA
  modified_base 1: mod_base = OTHER; note = cytidine-3'-phosphate
  modified_base 2: mod_base = OTHER; note = uridine-3'-phosphate
  modified_base 3: mod_base = OTHER; note = guanosine-3'-phosphate
  modified_base 4: mod_base = OTHER; note = uridine-3'-phosphate
  modified_base 5: mod_base = OTHER; note = adenosine-3'-phosphate
  modified_base 6: mod_base = OTHER; note = uridine-3'-phosphate
  modified_base 7: mod_base = OTHER; note = guanosine-3'-phosphate
  modified_base 8: mod_base = OTHER; note = cytidine-3'-phosphate
  modified_base 9: mod_base = OTHER; note = uridine-3'-phosphate
  modified_base 10: mod_base = OTHER; note = guanosine-3'-phosphate
  modified_base 11: mod_base = OTHER; note = guanosine-3'-phosphate
  modified_base 12: mod_base = OTHER; note = uridine-3'-phosphate
  modified_base 13: mod_base = OTHER; note = guanosine-3'-phosphate
  modified_base 14: mod_base = OTHER; note = uridine-3'-phosphate
  modified_base 15: mod_base = OTHER; note = cytidine-3'-phosphate
  modified_base 16: mod_base = OTHER; note = uridine-3'-phosphate
  modified_base 17: mod_base = OTHER; note = adenosine-3'-phosphate
  modified_base 18: mod_base = OTHER; note = guanosine-3'-phosphate
  modified_base 19: mod_base = OTHER; note = guanosine-3'-phosphate
  modified_base 20: mod_base = OTHER; note = 2'-deoxythymidine-3'-phosphorothioate
  misc_feature 1..19: note = RNA
  misc_feature 20..21: note = DNA
ctgtatgctggtgtctaggtt

SEQ ID NO: 307 - DNA, 21 bp, synthetic construct
  source 1..21: mol_type = other DNA
  modified_base 1: mod_base = OTHER; note = 2'-O-methylcytidine-3'-phosphate
  modified_base 2: mod_base = OTHER; note = 2'-O-methylcytidine-3'-phosphate
  modified_base 3: mod_base = OTHER; note = 2'-O-methyluridine-3'-phosphate
  modified_base 4: mod_base = OTHER; note = adenosine-3'-phosphate
  modified_base 5: mod_base = OTHER; note = guanosine-3'-phosphate
  modified_base 6: mod_base = OTHER; note = adenosine-3'-phosphate
  modified_base 7: mod_base = OTHER; note = 2'-O-methylcytidine-3'-phosphate
  modified_base 8: mod_base = OTHER; note = adenosine-3'-phosphate
  modified_base 9: mod_base = OTHER; note = 2'-O-methylcytidine-3'-phosphate
  modified_base 10: mod_base = OTHER; note = 2'-O-methylcytidine-3'-phosphate
  modified_base 11: mod_base = OTHER; note = adenosine-3'-phosphate
  modified_base 12: mod_base = OTHER; note = guanosine-3'-phosphate
  modified_base 13: mod_base = OTHER; note = 2'-O-methylcytidine-3'-phosphate
  modified_base 14: mod_base = OTHER; note = adenosine-3'-phosphate
  modified_base 15: mod_base = OTHER; note = 2'-O-methyluridine-3'-phosphate
  modified_base 16: mod_base = OTHER; note = adenosine-3'-phosphate
  modified_base 17: mod_base = OTHER; note = 2'-O-methylcytidine-3'-phosphate
  modified_base 18: mod_base = OTHER; note = adenosine-3'-phosphate
  modified_base 19: mod_base = OTHER; note = guanosine-3'-phosphate
  modified_base 20: mod_base = OTHER; note = 2'-deoxythymidine-3'-phosphorothioate
  misc_feature 1..19: note = RNA
  misc_feature 20..21: note = DNA
cctagacaccagcatacagtt

SEQ ID NO: 308 - DNA, 21 bp, synthetic construct
  source 1..21: mol_type = other DNA
  modified_base 1: mod_base = OTHER; note = cytidine-3'-phosphate
  modified_base 2: mod_base = OTHER; note = uridine-3'-phosphate
  modified_base 3: mod_base = OTHER; note = guanosine-3'-phosphate
  modified_base 4: mod_base = OTHER; note = 2'-O-methyluridine-3'-phosphate
  modified_base 5: mod_base = OTHER; note = adenosine-3'-phosphate
  modified_base 6: mod_base = OTHER; note = uridine-3'-phosphate
  modified_base 7: mod_base = OTHER; note = guanosine-3'-phosphate
  modified_base 8: mod_base = OTHER; note = cytidine-3'-phosphate
  modified_base 9: mod_base = OTHER; note = uridine-3'-phosphate
  modified_base 10: mod_base = OTHER; note = guanosine-3'-phosphate
  modified_base 11: mod_base = OTHER; note = guanosine-3'-phosphate
  modified_base 12: mod_base = OTHER; note = uridine-3'-phosphate
  modified_base 13: mod_base = OTHER; note = guanosine-3'-phosphate
  modified_base 14: mod_base = OTHER; note = uridine-3'-phosphate
  modified_base 15: mod_base = OTHER; note = cytidine-3'-phosphate
  modified_base 16: mod_base = OTHER; note = 2'-O-methyluridine-3'-phosphate
  modified_base 17: mod_base = OTHER; note = adenosine-3'-phosphate
  modified_base 18: mod_base = OTHER; note = guanosine-3'-phosphate
  modified_base 19: mod_base = OTHER; note = guanosine-3'-phosphate
  modified_base 20: mod_base = OTHER; note = 2'-deoxythymidine-3'-phosphorothioate
  misc_feature 1..19: note = RNA
  misc_feature 20..21: note = DNA
ctgtatgctggtgtctaggtt

SEQ ID NO: 309 - DNA, 21 bp, synthetic construct
  source 1..21: mol_type = other DNA
  modified_base 1: mod_base = OTHER; note = guanosine-3'-phosphate
  modified_base 2: mod_base = OTHER; note = adenosine-3'-phosphate
  modified_base 3: mod_base = OTHER; note = cytidine-3'-phosphate
  modified_base 4: mod_base = OTHER; note = adenosine-3'-phosphate
  modified_base 5: mod_base = OTHER; note = cytidine-3'-phosphate
  modified_base 6: mod_base = OTHER; note = cytidine-3'-phosphate
  modified_base 7: mod_base = OTHER; note = adenosine-3'-phosphate
  modified_base 8: mod_base = OTHER; note = guanosine-3'-phosphate
  modified_base 9: mod_base = OTHER; note = cytidine-3'-phosphate
  modified_base 10: mod_base = OTHER; note = adenosine-3'-phosphate
  modified_base 11: mod_base = OTHER; note = uridine-3'-phosphate
  modified_base 12: mod_base = OTHER; note = adenosine-3'-phosphate
  modified_base 13: mod_base = OTHER; note = cytidine-3'-phosphate
  modified_base 14: mod_base = OTHER; note = adenosine-3'-phosphate
  modified_base 15: mod_base = OTHER; note = guanosine-3'-phosphate
  modified_base 16: mod_base = OTHER; note = adenosine-3'-phosphate
  modified_base 17: mod_base = OTHER; note = guanosine-3'-phosphate
  modified_base 18: mod_base = OTHER; note = uridine-3'-phosphate
  modified_base 19: mod_base = OTHER; note = guanosine-3'-phosphate
  modified_base 20: mod_base = OTHER; note = 2'-deoxythymidine-3'-phosphorothioate
  misc_feature 1..19: note = RNA
  misc_feature 20..21: note = DNA
gacaccagcatacagagtgtt

SEQ ID NO: 310 - DNA, 21 bp, synthetic construct
  source 1..21: mol_type = other DNA
  modified_base 1: mod_base = OTHER; note = cytidine-3'-phosphate
  modified_base 2: mod_base = OTHER; note = adenosine-3'-phosphate
  modified_base 3: mod_base = OTHER; note = cytidine-3'-phosphate
  modified_base 4: mod_base = OTHER; note = uridine-3'-phosphate
  modified_base 5: mod_base = OTHER; note = cytidine-3'-phosphate
  modified_base 6: mod_base = OTHER; note = uridine-3'-phosphate
  modified_base 7: mod_base = OTHER; note = guanosine-3'-phosphate
  modified_base 8: mod_base = OTHER; note = uridine-3'-phosphate
  modified_base 9: mod_base = OTHER; note = adenosine-3'-phosphate
  modified_base 10: mod_base = OTHER; note = uridine-3'-phosphate
  modified_base 11: mod_base = OTHER; note = guanosine-3'-phosphate
  modified_base 12: mod_base = OTHER; note = cytidine-3'-phosphate
  modified_base 13: mod_base = OTHER; note = uridine-3'-phosphate
  modified_base 14: mod_base = OTHER; note = guanosine-3'-phosphate
  modified_base 15: mod_base = OTHER; note = guanosine-3'-phosphate
  modified_base 16: mod_base = OTHER; note = uridine-3'-phosphate
  modified_base 17: mod_base = OTHER; note = guanosine-3'-phosphate
  modified_base 18: mod_base = OTHER; note = uridine-3'-phosphate
  modified_base 19: mod_base = OTHER; note = cytidine-3'-phosphate
  modified_base 20: mod_base = OTHER; note = 2'-deoxythymidine-3'-phosphorothioate
  misc_feature 1..19: note = RNA
  misc_feature 20..21: note = DNA
cactctgtatgctggtgtctt

SEQ ID NO: 311 - DNA, 21 bp, synthetic construct
  source 1..21: mol_type = other DNA
  modified_base 1: mod_base = OTHER; note = guanosine-3'-phosphate
  modified_base 2: mod_base = OTHER; note = adenosine-3'-phosphate
  modified_base 3: mod_base = OTHER; note = 2'-O-methylcytidine-3'-phosphate
  modified_base 4: mod_base = OTHER; note = adenosine-3'-phosphate
  modified_base 5: mod_base = OTHER; note = 2'-O-methylcytidine-3'-phosphate
  modified_base 6: mod_base = OTHER; note = 2'-O-methylcytidine-3'-phosphate
  modified_base 7: mod_base = OTHER; note = adenosine-3'-phosphate
  modified_base 8: mod_base = OTHER; note = guanosine-3'-phosphate
  modified_base 9: mod_base = OTHER; note = 2'-O-methylcytidine-3'-phosphate
  modified_base 10: mod_base = OTHER; note = adenosine-3'-phosphate
  modified_base 11: mod_base = OTHER; note = 2'-O-methyluridine-3'-phosphate
  modified_base 12: mod_base = OTHER; note = adenosine-3'-phosphate
  modified_base 13: mod_base = OTHER; note = 2'-O-methylcytidine-3'-phosphate
  modified_base 14: mod_base = OTHER; note = adenosine-3'-phosphate
  modified_base 15: mod_base = OTHER; note = guanosine-3'-phosphate
  modified_base 16: mod_base = OTHER; note = adenosine-3'-phosphate
  modified_base 17: mod_base = OTHER; note = guanosine-3'-phosphate
  modified_base 18: mod_base = OTHER; note = 2'-O-methyluridine-3'-phosphate
  modified_base 19: mod_base = OTHER; note = guanosine-3'-phosphate
  modified_base 20: mod_base = OTHER; note = 2'-deoxythymidine-3'-phosphorothioate
  misc_feature 1..19: note = RNA
  misc_feature 20..21: note = DNA
gacaccagcatacagagtgtt

SEQ ID NO: 312 - DNA, 21 bp, synthetic construct
  source 1..21: mol_type = other DNA
  modified_base 1: mod_base = OTHER; note = 2'-O-methylcytidine-3'-phosphate
  modified_base 2: mod_base = OTHER; note = adenosine-3'-phosphate
  modified_base 3: mod_base = OTHER; note = cytidine-3'-phosphate
  modified_base 4: mod_base = OTHER; note = uridine-3'-phosphate
  modified_base 5: mod_base = OTHER; note = cytidine-3'-phosphate
  modified_base 6: mod_base = OTHER; note = uridine-3'-phosphate
  modified_base 7: mod_base = OTHER; note = guanosine-3'-phosphate
  modified_base 8: mod_base = OTHER; note = 2'-O-methyluridine-3'-phosphate
  modified_base 9: mod_base = OTHER; note = adenosine-3'-phosphate
  modified_base 10: mod_base = OTHER; note = uridine-3'-phosphate
  modified_base 11: mod_base = OTHER; note = guanosine-3'-phosphate
  modified_base 12: mod_base = OTHER; note = cytidine-3'-phosphate
  modified_base 13: mod_base = OTHER; note = uridine-3'-phosphate
  modified_base 14: mod_base = OTHER; note = guanosine-3'-phosphate
  modified_base 15: mod_base = OTHER; note = guanosine-3'-phosphate
  modified_base 16: mod_base = OTHER; note = uridine-3'-phosphate
  modified_base 17: mod_base = OTHER; note = guanosine-3'-phosphate
  modified_base 18: mod_base = OTHER; note = uridine-3'-phosphate
  modified_base 19: mod_base = OTHER; note = cytidine-3'-phosphate
  modified_base 20: mod_base = OTHER; note = 2'-deoxythymidine-3'-phosphorothioate
  misc_feature 1..19: note = RNA
  misc_feature 20..21: note = DNA
cactctgtatgctggtgtctt

SEQ ID NO: 313 - DNA, 21 bp, synthetic construct
  source 1..21: mol_type = other DNA
  modified_base 1: mod_base = OTHER; note = cytidine-3'-phosphate
  modified_base 2: mod_base = OTHER; note = adenosine-3'-phosphate
  modified_base 3: mod_base = OTHER; note = uridine-3'-phosphate
  modified_base 4: mod_base = OTHER; note = adenosine-3'-phosphate
  modified_base 5: mod_base = OTHER; note = cytidine-3'-phosphate
  modified_base 6: mod_base = OTHER; note = adenosine-3'-phosphate
  modified_base 7: mod_base = OTHER; note = guanosine-3'-phosphate
  modified_base 8: mod_base = OTHER; note = adenosine-3'-phosphate
  modified_base 9: mod_base = OTHER; note = guanosine-3'-phosphate
  modified_base 10: mod_base = OTHER; note = uridine-3'-phosphate
  modified_base 11: mod_base = OTHER; note = guanosine-3'-phosphate
  modified_base 12: mod_base = OTHER; note = adenosine-3'-phosphate
  modified_base 13: mod_base = OTHER; note = cytidine-3'-phosphate
  modified_base 14: mod_base = OTHER; note = cytidine-3'-phosphate
  modified_base 15: mod_base = OTHER; note = adenosine-3'-phosphate
  modified_base 16: mod_base = OTHER; note = cytidine-3'-phosphate
  modified_base 17: mod_base = OTHER; note = cytidine-3'-phosphate
  modified_base 18: mod_base = OTHER; note = guanosine-3'-phosphate
  modified_base 19: mod_base = OTHER; note = guanosine-3'-phosphate
  modified_base 20: mod_base = OTHER; note = 2'-deoxythymidine-3'-phosphorothioate
  misc_feature 1..19: note = RNA
  misc_feature 20..21: note = DNA
catacagagtgaccaccggtt

SEQ ID NO: 314 - DNA, 21 bp, synthetic construct
  source 1..21: mol_type = other DNA
  modified_base 1: mod_base = OTHER; note = cytidine-3'-phosphate
  modified_base 2: mod_base = OTHER; note = cytidine-3'-phosphate
  modified_base 3: mod_base = OTHER; note = guanosine-3'-phosphate
  modified_base 4: mod_base = OTHER; note = guanosine-3'-phosphate
  modified_base 5: mod_base = OTHER; note = uridine-3'-phosphate
  modified_base 6: mod_base = OTHER; note = guanosine-3'-phosphate
  modified_base 7: mod_base = OTHER; note = guanosine-3'-phosphate
  modified_base 8: mod_base = OTHER; note = uridine-3'-phosphate
  modified_base 9: mod_base = OTHER; note = cytidine-3'-phosphate
  modified_base 10: mod_base = OTHER; note = adenosine-3'-phosphate
  modified_base 11: mod_base = OTHER; note = cytidine-3'-phosphate
  modified_base 12: mod_base = OTHER; note = uridine-3'-phosphate
  modified_base 13: mod_base = OTHER; note = cytidine-3'-phosphate
  modified_base 14: mod_base = OTHER; note = uridine-3'-phosphate
  modified_base 15: mod_base = OTHER; note = guanosine-3'-phosphate
  modified_base 16: mod_base = OTHER; note = uridine-3'-phosphate
  modified_base 17: mod_base = OTHER; note = adenosine-3'-phosphate
  modified_base 18: mod_base = OTHER; note = uridine-3'-phosphate
  modified_base 19: mod_base = OTHER; note = guanosine-3'-phosphate
  modified_base 20: mod_base = OTHER; note = 2'-deoxythymidine-3'-phosphorothioate
  misc_feature 1..19: note = RNA
  misc_feature 20..21: note = DNA
ccggtggtcactctgtatgtt

SEQ ID NO: 315 - DNA, 21 bp, synthetic construct
  source 1..21: mol_type = other DNA
  modified_base 1: mod_base = OTHER; note = 2'-O-methylcytidine-3'-phosphate
  modified_base 2: mod_base = OTHER; note = adenosine-3'-phosphate
  modified_base 3: mod_base = OTHER; note = 2'-O-methyluridine-3'-phosphate
  modified_base 4: mod_base = OTHER; note = adenosine-3'-phosphate
  modified_base 5: mod_base = OTHER; note = 2'-O-methylcytidine-3'-phosphate
  modified_base 6: mod_base = OTHER; note = adenosine-3'-phosphate
  modified_base 7: mod_base = OTHER; note = guanosine-3'-phosphate
  modified_base 8: mod_base = OTHER; note = adenosine-3'-phosphate
  modified_base 9: mod_base = OTHER; note = guanosine-3'-phosphate
  modified_base 10: mod_base = OTHER; note = 2'-O-methyluridine-3'-phosphate
  modified_base 11: mod_base = OTHER; note = guanosine-3'-phosphate
  modified_base 12: mod_base = OTHER; note = adenosine-3'-phosphate
  modified_base 13: mod_base = OTHER; note = 2'-O-methylcytidine-3'-phosphate
  modified_base 14: mod_base = OTHER; note = 2'-O-methylcytidine-3'-phosphate
  modified_base 15: mod_base = OTHER; note = adenosine-3'-phosphate
  modified_base 16: mod_base = OTHER; note = 2'-O-methylcytidine-3'-phosphate
  modified_base 17: mod_base = OTHER; note = 2'-O-methylcytidine-3'-phosphate
  modified_base 18: mod_base = OTHER; note = guanosine-3'-phosphate
  modified_base 19: mod_base = OTHER; note = guanosine-3'-phosphate
  modified_base 20: mod_base = OTHER; note = 2'-deoxythymidine-3'-phosphorothioate
  misc_feature 1..19: note = RNA
  misc_feature 20..21: note = DNA
catacagagtgaccaccggtt

SEQ ID NO: 316 - DNA, 21 bp, synthetic construct
  source 1..21: mol_type = other DNA
  modified_base 1: mod_base = OTHER; note = cytidine-3'-phosphate
  modified_base 2: mod_base = OTHER; note = cytidine-3'-phosphate
  modified_base 3: mod_base = OTHER; note = guanosine-3'-phosphate
  modified_base 4: mod_base = OTHER; note = guanosine-3'-phosphate
  modified_base 5: mod_base = OTHER; note = uridine-3'-phosphate
  modified_base 6: mod_base = OTHER; note = guanosine-3'-phosphate
  modified_base 7: mod_base = OTHER; note = guanosine-3'-phosphate
  modified_base 8: mod_base = OTHER; note = uridine-3'-phosphate
  modified_base 9: mod_base = OTHER; note = 2'-O-methylcytidine-3'-phosphate
  modified_base 10: mod_base = OTHER; note = adenosine-3'-phosphate
  modified_base 11: mod_base = OTHER; note = cytidine-3'-phosphate
  modified_base 12: mod_base = OTHER; note = uridine-3'-phosphate
  modified_base 13: mod_base = OTHER; note = cytidine-3'-phosphate
  modified_base 14: mod_base = OTHER; note = uridine-3'-phosphate
  modified_base 15: mod_base = OTHER; note = guanosine-3'-phosphate
  modified_base 16: mod_base = OTHER; note = 2'-O-methyluridine-3'-phosphate
  modified_base 17: mod_base = OTHER; note = adenosine-3'-phosphate
  modified_base 18: mod_base = OTHER; note = uridine-3'-phosphate
  modified_base 19: mod_base = OTHER; note = guanosine-3'-phosphate
  modified_base 20: mod_base = OTHER; note = 2'-deoxythymidine-3'-phosphorothioate
  misc_feature 1..19: note = RNA
  misc_feature 20..21: note = DNA
ccggtggtcactctgtatgtt

SEQ ID NO: 317 - DNA, 21 bp, synthetic construct
  source 1..21: mol_type = other DNA
  modified_base 1: mod_base = OTHER; note = adenosine-3'-phosphate
  modified_base 2: mod_base = OTHER; note = guanosine-3'-phosphate
  modified_base 3: mod_base = OTHER; note = adenosine-3'-phosphate
  modified_base 4: mod_base = OTHER; note = guanosine-3'-phosphate
  modified_base 5: mod_base = OTHER; note = uridine-3'-phosphate
  modified_base 6: mod_base = OTHER; note = guanosine-3'-phosphate
  modified_base 7: mod_base = OTHER; note = adenosine-3'-phosphate
  modified_base 8: mod_base = OTHER; note = cytidine-3'-phosphate
  modified_base 9: mod_base = OTHER; note = cytidine-3'-phosphate
  modified_base 10: mod_base = OTHER; note = adenosine-3'-phosphate
  modified_base 11: mod_base = OTHER; note = cytidine-3'-phosphate
  modified_base 12: mod_base = OTHER; note = cytidine-3'-phosphate
  modified_base 13: mod_base = OTHER; note = guanosine-3'-phosphate
  modified_base 14: mod_base = OTHER; note = guanosine-3'-phosphate
  modified_base 15: mod_base = OTHER; note = guanosine-3'-phosphate
  modified_base 16: mod_base = OTHER; note = adenosine-3'-phosphate
  modified_base 17: mod_base = OTHER; note = adenosine-3'-phosphate
  modified_base 18: mod_base = OTHER; note = adenosine-3'-phosphate
  modified_base 19: mod_base = OTHER; note = uridine-3'-phosphate
  modified_base 20: mod_base = OTHER; note = 2'-deoxythymidine-3'-phosphorothioate
  misc_feature 1..19: note = RNA
  misc_feature 20..21: note = DNA
agagtgaccaccgggaaattt

SEQ ID NO: 318 - DNA, 21 bp, synthetic construct
  source 1..21: mol_type = other DNA
  modified_base 1: mod_base = OTHER; note = adenosine-3'-phosphate
  modified_base 2: mod_base = OTHER; note = uridine-3'-phosphate
  modified_base 3: mod_base = OTHER; note = uridine-3'-phosphate
  modified_base 4: mod_base = OTHER; note = uridine-3'-phosphate
  modified_base 5: mod_base = OTHER; note = cytidine-3'-phosphate
  modified_base 6: mod_base = OTHER; note = cytidine-3'-phosphate
  modified_base 7: mod_base = OTHER; note = cytidine-3'-phosphate
  modified_base 8: mod_base = OTHER; note = guanosine-3'-phosphate
  modified_base 9: mod_base = OTHER; note = guanosine-3'-phosphate
  modified_base 10: mod_base = OTHER; note = uridine-3'-phosphate
  modified_base 11: mod_base = OTHER; note = guanosine-3'-phosphate
  modified_base 12: mod_base = OTHER; note = guanosine-3'-phosphate
  modified_base 13: mod_base = OTHER; note = uridine-3'-phosphate
  modified_base 14: mod_base = OTHER; note = cytidine-3'-phosphate
  modified_base 15: mod_base = OTHER; note = adenosine-3'-phosphate
  modified_base 16: mod_base = OTHER; note = cytidine-3'-phosphate
  modified_base 17: mod_base = OTHER; note = uridine-3'-phosphate
  modified_base 18: mod_base = OTHER; note = cytidine-3'-phosphate
  modified_base 19: mod_base = OTHER; note = uridine-3'-phosphate
  modified_base 20: mod_base = OTHER; note = 2'-deoxythymidine-3'-phosphorothioate
  misc_feature 1..19: note = RNA
  misc_feature 20..21: note = DNA
atttcccggtggtcactcttt

SEQ ID NO: 319 - DNA, 21 bp, synthetic construct
  source 1..21: mol_type = other DNA
  modified_base 1: mod_base = OTHER; note = adenosine-3'-phosphate
  modified_base 2: mod_base = OTHER; note = guanosine-3'-phosphate
  modified_base 3: mod_base = OTHER; note = adenosine-3'-phosphate
  modified_base 4: mod_base = OTHER; note = guanosine-3'-phosphate
  modified_base 5: mod_base = OTHER; note = 2'-O-methyluridine-3'-phosphate
  modified_base 6: mod_base = OTHER; note = guanosine-3'-phosphate
  modified_base 7: mod_base = OTHER; note = adenosine-3'-phosphate
  modified_base 8: mod_base = OTHER; note = 2'-O-methylcytidine-3'-phosphate
  modified_base 9: mod_base = OTHER; note = 2'-O-methylcytidine-3'-phosphate
  modified_base 10: mod_base = OTHER; note = adenosine-3'-phosphate
  modified_base 11: mod_base = OTHER; note = 2'-O-methylcytidine-3'-phosphate
  modified_base 12: mod_base = OTHER; note = 2'-O-methylcytidine-3'-phosphate
  modified_base 13: mod_base = OTHER; note = guanosine-3'-phosphate
  modified_base 14: mod_base = OTHER; note = guanosine-3'-phosphate
  modified_base 15: mod_base = OTHER; note = guanosine-3'-phosphate
  modified_base 16: mod_base = OTHER; note = adenosine-3'-phosphate
  modified_base 17: mod_base = OTHER; note = adenosine-3'-phosphate
  modified_base 18: mod_base = OTHER; note = adenosine-3'-phosphate
  modified_base 19: mod_base = OTHER; note = 2'-O-methyluridine-3'-phosphate
  modified_base 20: mod_base = OTHER; note = 2'-deoxythymidine-3'-phosphorothioate
  misc_feature 1..19: note = RNA
  misc_feature 20..21: note = DNA
agagtgaccaccgggaaattt

SEQ ID NO: 320 - DNA, 21 bp, synthetic construct
  source 1..21: mol_type = other DNA
  modified_base 1: mod_base = OTHER; note = adenosine-3'-phosphate
  modified_base 2: mod_base = OTHER; note = uridine-3'-phosphate
  modified_base 3: mod_base = OTHER; note = uridine-3'-phosphate
  modified_base 4: mod_base = OTHER; note = uridine-3'-phosphate
  modified_base 5: mod_base = OTHER; note = cytidine-3'-phosphate
  modified_base 6: mod_base = OTHER; note = cytidine-3'-phosphate
  modified_base 7: mod_base = OTHER; note = cytidine-3'-phosphate
  modified_base 8: mod_base = OTHER; note = guanosine-3'-phosphate
  modified_base 9: mod_base = OTHER; note = guanosine-3'-phosphate
  modified_base 10: mod_base = OTHER; note = uridine-3'-phosphate
  modified_base 11: mod_base = OTHER; note = guanosine-3'-phosphate
  modified_base 12: mod_base = OTHER; note = guanosine-3'-phosphate
  modified_base 13: mod_base = OTHER; note = uridine-3'-phosphate
  modified_base 14: mod_base = OTHER; note = 2'-O-methylcytidine-3'-phosphate
  modified_base 15: mod_base = OTHER; note = adenosine-3'-phosphate
  modified_base 16: mod_base = OTHER; note = cytidine-3'-phosphate
  modified_base 17: mod_base = OTHER; note = uridine-3'-phosphate
  modified_base 18: mod_base = OTHER; note = cytidine-3'-phosphate
  modified_base 19: mod_base = OTHER; note = uridine-3'-phosphate
  modified_base 20: mod_base = OTHER; note = 2'-deoxythymidine-3'-phosphorothioate
  misc_feature 1..19: note = RNA
  misc_feature 20..21: note = DNA
atttcccggtggtcactcttt

SEQ ID NO: 321 - DNA, 21 bp, synthetic construct
  source 1..21: mol_type = other DNA
  modified_base 1: mod_base = OTHER; note = guanosine-3'-phosphate
  modified_base 2: mod_base = OTHER; note = adenosine-3'-phosphate
  modified_base 3: mod_base = OTHER; note = guanosine-3'-phosphate
  modified_base 4: mod_base = OTHER; note = uridine-3'-phosphate
  modified_base 5: mod_base = OTHER; note = guanosine-3'-phosphate
  modified_base 6: mod_base = OTHER; note = adenosine-3'-phosphate
  modified_base 7: mod_base = OTHER; note = cytidine-3'-phosphate
  modified_base 8: mod_base = OTHER; note = cytidine-3'-phosphate
  modified_base 9: mod_base = OTHER; note = adenosine-3'-phosphate
  modified_base 10: mod_base = OTHER; note = cytidine-3'-phosphate
  modified_base 11: mod_base = OTHER; note = cytidine-3'-phosphate
  modified_base 12: mod_base = OTHER; note = guanosine-3'-phosphate
  modified_base 13: mod_base = OTHER; note = guanosine-3'-phosphate
  modified_base 14: mod_base = OTHER; note = guanosine-3'-phosphate
  modified_base 15: mod_base = OTHER; note = adenosine-3'-phosphate
  modified_base 16: mod_base = OTHER; note = adenosine-3'-phosphate
  modified_base 17: mod_base = OTHER; note = adenosine-3'-phosphate
  modified_base 18: mod_base = OTHER; note = uridine-3'-phosphate
  modified_base 19: mod_base = OTHER; note = cytidine-3'-phosphate
  modified_base 20: mod_base = OTHER; note = 2'-deoxythymidine-3'-phosphorothioate
  misc_feature 1..19: note = RNA
  misc_feature 20..21: note = DNA
gagtgaccaccgggaaatctt

SEQ ID NO: 322 - DNA, 21 bp, synthetic construct
  source 1..21: mol_type = other DNA
  modified_base 1: mod_base = OTHER; note = guanosine-3'-phosphate
  modified_base 2: mod_base = OTHER; note = adenosine-3'-phosphate
  modified_base 3: mod_base = OTHER; note = uridine-3'-phosphate
  modified_base 4: mod_base = OTHER; note = uridine-3'-phosphate
  modified_base 5: mod_base = OTHER; note = uridine-3'-phosphate
  modified_base 6: mod_base = OTHER; note = cytidine-3'-phosphate
  modified_base 7: mod_base = OTHER; note = cytidine-3'-phosphate
  modified_base 8: mod_base = OTHER; note = cytidine-3'-phosphate
  modified_base 9: mod_base = OTHER; note = guanosine-3'-phosphate
  modified_base 10: mod_base = OTHER; note = guanosine-3'-phosphate
  modified_base 11: mod_base = OTHER; note = uridine-3'-phosphate
  modified_base 12: mod_base = OTHER; note = guanosine-3'-phosphate
  modified_base 13: mod_base = OTHER; note = guanosine-3'-phosphate
  modified_base 14: mod_base = OTHER; note = uridine-3'-phosphate
  modified_base 15: mod_base = OTHER; note = cytidine-3'-phosphate
  modified_base 16: mod_base = OTHER; note = adenosine-3'-phosphate
  modified_base 17: mod_base = OTHER; note = cytidine-3'-phosphate
  modified_base 18: mod_base = OTHER; note = uridine-3'-phosphate
  modified_base 19: mod_base = OTHER; note = cytidine-3'-phosphate
  modified_base 20: mod_base = OTHER; note = 2'-deoxythymidine-3'-phosphorothioate
  misc_feature 1..19: note = RNA
  misc_feature 20..21: note = DNA
gatttcccggtggtcactctt

SEQ ID NO: 323 - DNA, 21 bp, synthetic construct
  source 1..21: mol_type = other DNA
  modified_base 1: mod_base = OTHER; note = guanosine-3'-phosphate
  modified_base 2: mod_base = OTHER; note = adenosine-3'-phosphate
  modified_base 3: mod_base = OTHER; note = guanosine-3'-phosphate
  modified_base 4: mod_base = OTHER; note = 2'-O-methyluridine-3'-phosphate
  modified_base 5: mod_base = OTHER; note = guanosine-3'-phosphate
  modified_base 6: mod_base = OTHER; note = adenosine-3'-phosphate
  modified_base 7: mod_base = OTHER; note = 2'-O-methylcytidine-3'-phosphate
  modified_base 8: mod_base = OTHER; note = 2'-O-methylcytidine-3'-phosphate
  modified_base 9: mod_base = OTHER; note = adenosine-3'-phosphate
  modified_base 10: mod_base = OTHER; note = 2'-O-methylcytidine-3'-phosphate
  modified_base 11: mod_base = OTHER; note = 2'-O-methylcytidine-3'-phosphate
  modified_base 12: mod_base = OTHER; note = guanosine-3'-phosphate
  modified_base 13: mod_base = OTHER; note = guanosine-3'-phosphate
  modified_base 14: mod_base = OTHER; note = guanosine-3'-phosphate
  modified_base 15: mod_base = OTHER; note = adenosine-3'-phosphate
  modified_base 16: mod_base = OTHER; note = adenosine-3'-phosphate
  modified_base 17: mod_base = OTHER; note = adenosine-3'-phosphate
  modified_base 18: mod_base = OTHER; note = 2'-O-methyluridine-3'-phosphate
  modified_base 19: mod_base = OTHER; note = 2'-O-methylcytidine-3'-phosphate
  modified_base 20: mod_base = OTHER; note = 2'-deoxythymidine-3'-phosphorothioate
  misc_feature 1..19: note = RNA
  misc_feature 20..21: note = DNA
gagtgaccaccgggaaatctt

SEQ ID NO: 324 - DNA, 21 bp, synthetic construct
  source 1..21: mol_type = other DNA
  modified_base 1: mod_base = OTHER; note = guanosine-3'-phosphate
  modified_base 2: mod_base = OTHER; note = adenosine-3'-phosphate
  modified_base 3: mod_base = OTHER; note = uridine-3'-phosphate
  modified_base 4: mod_base = OTHER; note = uridine-3'-phosphate
  modified_base 5: mod_base = OTHER; note = uridine-3'-phosphate
  modified_base 6: mod_base = OTHER; note = cytidine-3'-phosphate
  modified_base 7: mod_base = OTHER; note = cytidine-3'-phosphate
  modified_base 8: mod_base = OTHER; note = cytidine-3'-phosphate
  modified_base 9: mod_base = OTHER; note = guanosine-3'-phosphate
  modified_base 10: mod_base = OTHER; note = guanosine-3'-phosphate
  modified_base 11: mod_base = OTHER; note = uridine-3'-phosphate
  modified_base 12: mod_base = OTHER; note = guanosine-3'-phosphate
  modified_base 13: mod_base = OTHER; note = guanosine-3'-phosphate
  modified_base 14: mod_base = OTHER; note = uridine-3'-phosphate
  modified_base 15: mod_base = OTHER; note = 2'-O-methylcytidine-3'-phosphate
  modified_base 16: mod_base = OTHER; note = adenosine-3'-phosphate
  modified_base 17: mod_base = OTHER; note = cytidine-3'-phosphate
  modified_base 18: mod_base = OTHER; note = uridine-3'-phosphate
  modified_base 19: mod_base = OTHER; note = cytidine-3'-phosphate
  modified_base 20: mod_base = OTHER; note = 2'-deoxythymidine-3'-phosphorothioate
  misc_feature 1..19: note = RNA
  misc_feature 20..21: note = DNA
gatttcccggtggtcactctt

SEQ ID NO: 325 - DNA, 21 bp, synthetic construct
  source 1..21: mol_type = other DNA
  modified_base 1: mod_base = OTHER; note = guanosine-3'-phosphate
  modified_base 2: mod_base = OTHER; note = uridine-3'-phosphate
  modified_base 3: mod_base = OTHER; note = guanosine-3'-phosphate
  modified_base 4: mod_base = OTHER; note = adenosine-3'-phosphate
  modified_base 5: mod_base = OTHER; note = cytidine-3'-phosphate
  modified_base 6: mod_base = OTHER; note = cytidine-3'-phosphate
  modified_base 7: mod_base = OTHER; note = adenosine-3'-phosphate
  modified_base 8: mod_base = OTHER; note = cytidine-3'-phosphate
  modified_base 9: mod_base = OTHER; note = cytidine-3'-phosphate
  modified_base 10: mod_base = OTHER; note = guanosine-3'-phosphate
  modified_base 11: mod_base = OTHER; note = guanosine-3'-phosphate
  modified_base 12: mod_base = OTHER; note = guanosine-3'-phosphate
  modified_base 13: mod_base = OTHER; note = adenosine-3'-phosphate
  modified_base 14: mod_base = OTHER; note = adenosine-3'-phosphate
  modified_base 15: mod_base = OTHER; note = adenosine-3'-phosphate
  modified_base 16: mod_base = OTHER; note = uridine-3'-phosphate
  modified_base 17: mod_base = OTHER; note = cytidine-3'-phosphate
  modified_base 18: mod_base = OTHER; note = guanosine-3'-phosphate
  modified_base 19: mod_base = OTHER; note = adenosine-3'-phosphate
  modified_base 20: mod_base = OTHER; note = 2'-deoxythymidine-3'-phosphorothioate
  misc_feature 1..19: note = RNA
  misc_feature 20..21: note = DNA
gtgaccaccgggaaatcgatt

SEQ ID NO: 326 - DNA, 21 bp, synthetic construct
  source 1..21: mol_type = other DNA
  modified_base 1: mod_base = OTHER; note = uridine-3'-phosphate
  modified_base 2: mod_base = OTHER; note = cytidine-3'-phosphate
  modified_base 3: mod_base = OTHER; note = guanosine-3'-phosphate
  modified_base 4: mod_base = OTHER; note = adenosine-3'-phosphate
  modified_base 5: mod_base = OTHER; note = uridine-3'-phosphate
  modified_base 6: mod_base = OTHER; note = uridine-3'-phosphate
  modified_base 7: mod_base = OTHER; note = uridine-3'-phosphate
  modified_base 8: mod_base = OTHER; note = cytidine-3'-phosphate
  modified_base 9: mod_base = OTHER; note = cytidine-3'-phosphate
  modified_base 10: mod_base = OTHER; note = cytidine-3'-phosphate
  modified_base 11: mod_base = OTHER; note = guanosine-3'-phosphate
  modified_base 12: mod_base = OTHER; note = guanosine-3'-phosphate
  modified_base 13: mod_base = OTHER; note = uridine-3'-phosphate
  modified_base 14: mod_base = OTHER; note = guanosine-3'-phosphate
  modified_base 15: mod_base = OTHER; note = guanosine-3'-phosphate
  modified_base 16: mod_base = OTHER; note = uridine-3'-phosphate
  modified_base 17: mod_base = OTHER; note = cytidine-3'-phosphate
  modified_base 18: mod_base = OTHER; note = adenosine-3'-phosphate
  modified_base 19: mod_base = OTHER; note = cytidine-3'-phosphate
  modified_base 20: mod_base = OTHER; note = 2'-deoxythymidine-3'-phosphorothioate
  misc_feature 1..19: note = RNA
  misc_feature 20..21: note = DNA
tcgatttcccggtggtcactt

SEQ ID NO: 327 - DNA, 21 bp, synthetic construct
  source 1..21: mol_type = other DNA
  modified_base 1: mod_base = OTHER; note = guanosine-3'-phosphate
  modified_base 2: mod_base = OTHER; note = 2'-O-methyluridine-3'-phosphate
  modified_base 3: mod_base = OTHER; note = guanosine-3'-phosphate
  modified_base 4: mod_base = OTHER; note = adenosine-3'-phosphate
  modified_base 5: mod_base = OTHER; note = 2'-O-methylcytidine-3'-phosphate
  modified_base 6: mod_base = OTHER; note = 2'-O-methylcytidine-3'-phosphate
  modified_base 7: mod_base = OTHER; note = adenosine-3'-phosphate
  modified_base 8: mod_base = OTHER; note = 2'-O-methylcytidine-3'-phosphate
  modified_base 9: mod_base = OTHER; note = 2'-O-methylcytidine-3'-phosphate
  modified_base 10: mod_base = OTHER; note = guanosine-3'-phosphate
  modified_base 11: mod_base = OTHER; note = guanosine-3'-phosphate
  modified_base 12: mod_base = OTHER; note = guanosine-3'-phosphate
  modified_base 13: mod_base = OTHER; note = adenosine-3'-phosphate
  modified_base 14: mod_base = OTHER; note = adenosine-3'-phosphate
  modified_base 15: mod_base = OTHER; note = adenosine-3'-phosphate
  modified_base 16: mod_base = OTHER; note = 2'-O-methyluridine-3'-phosphate
  modified_base 17: mod_base = OTHER; note = 2'-O-methylcytidine-3'-phosphate
  modified_base 18: mod_base = OTHER; note = guanosine-3'-phosphate
  modified_base 19: mod_base = OTHER; note = adenosine-3'-phosphate
  modified_base 20: mod_base = OTHER; note = 2'-deoxythymidine-3'-phosphorothioate
  misc_feature 1..19: note = RNA
  misc_feature 20..21: note = DNA
gtgaccaccgggaaatcgatt

SEQ ID NO: 328 - DNA, 21 bp, synthetic construct
  source 1..21: mol_type = other DNA
  modified_base 1: mod_base = OTHER; note = uridine-3'-phosphate
  modified_base 2: mod_base = OTHER; note = cytidine-3'-phosphate
  modified_base 3: mod_base = OTHER; note = guanosine-3'-phosphate
  modified_base 4: mod_base = OTHER; note = adenosine-3'-phosphate
  modified_base 5: mod_base = OTHER; note = uridine-3'-phosphate
  modified_base 6: mod_base = OTHER; note = uridine-3'-phosphate
  modified_base 7: mod_base = OTHER; note = uridine-3'-phosphate
  modified_base 8: mod_base = OTHER; note = cytidine-3'-phosphate
  modified_base 9: mod_base = OTHER; note = cytidine-3'-phosphate
  modified_base 10: mod_base = OTHER; note = cytidine-3'-phosphate
  modified_base 11: mod_base = OTHER; note = guanosine-3'-phosphate
  modified_base 12: mod_base = OTHER; note = guanosine-3'-phosphate
  modified_base 13: mod_base = OTHER; note = uridine-3'-phosphate
  modified_base 14: mod_base = OTHER; note = guanosine-3'-phosphate
  modified_base 15: mod_base = OTHER; note = guanosine-3'-phosphate
  modified_base 16: mod_base = OTHER; note = uridine-3'-phosphate
  modified_base 17: mod_base = OTHER; note = 2'-O-methylcytidine-3'-phosphate
  modified_base 18: mod_base = OTHER; note = adenosine-3'-phosphate
  modified_base 19: mod_base = OTHER; note = cytidine-3'-phosphate
  modified_base 20: mod_base = OTHER; note = 2'-deoxythymidine-3'-phosphorothioate
  misc_feature 1..19: note = RNA
  misc_feature 20..21: note = DNA
tcgatttcccggtggtcactt

SEQ ID NO: 329 - DNA, 21 bp, synthetic construct
  source 1..21: mol_type = other DNA
  modified_base 1: mod_base = OTHER; note = guanosine-3'-phosphate
  modified_base 2: mod_base = OTHER; note = adenosine-3'-phosphate
  modified_base 3: mod_base = OTHER; note = cytidine-3'-phosphate
  modified_base 4: mod_base = OTHER; note = cytidine-3'-phosphate
  modified_base 5: mod_base = OTHER; note = adenosine-3'-phosphate
  modified_base 6: mod_base = OTHER; note = cytidine-3'-phosphate
  modified_base 7: mod_base = OTHER; note = cytidine-3'-phosphate
  modified_base 8: mod_base = OTHER; note = guanosine-3'-phosphate
  modified_base 9: mod_base = OTHER; note = guanosine-3'-phosphate
  modified_base 10: mod_base = OTHER; note = guanosine-3'-phosphate
  modified_base 11: mod_base = OTHER; note = adenosine-3'-phosphate
  modified_base 12: mod_base = OTHER; note = adenosine-3'-phosphate
  modified_base 13: mod_base = OTHER; note = adenosine-3'-phosphate
  modified_base 14: mod_base = OTHER; note = uridine-3'-phosphate
  modified_base 15: mod_base = OTHER; note = cytidine-3'-phosphate
  modified_base 16: mod_base = OTHER; note = guanosine-3'-phosphate
  modified_base 17: mod_base = OTHER; note = adenosine-3'-phosphate
  modified_base 18: mod_base = OTHER; note = guanosine-3'-phosphate
  modified_base 19: mod_base = OTHER; note = guanosine-3'-phosphate
  modified_base 20: mod_base = OTHER; note = 2'-deoxythymidine-3'-phosphorothioate
  misc_feature 1..19: note = RNA
  misc_feature 20..21: note = DNA
gaccaccgggaaatcgaggtt

SEQ ID NO: 330 - DNA, 21 bp, synthetic construct
  source 1..21: mol_type = other DNA
  modified_base 1: mod_base = OTHER; note = cytidine-3'-phosphate
  modified_base 2: mod_base = OTHER; note = cytidine-3'-phosphate
  modified_base 3: mod_base = OTHER; note = uridine-3'-phosphate
  modified_base 4: mod_base = OTHER; note = cytidine-3'-phosphate
  modified_base 5: mod_base = OTHER; note = guanosine-3'-phosphate
  modified_base 6: mod_base = OTHER; note = adenosine-3'-phosphate
  modified_base 7: mod_base = OTHER; note = uridine-3'-phosphate
  modified_base 8: mod_base = OTHER; note = uridine-3'-phosphate
  modified_base 9: mod_base = OTHER; note = uridine-3'-phosphate
  modified_base 10: mod_base = OTHER; note = cytidine-3'-phosphate
  modified_base 11: mod_base = OTHER; note = cytidine-3'-phosphate
  modified_base 12: mod_base = OTHER; note = cytidine-3'-phosphate
  modified_base 13: mod_base = OTHER; note = guanosine-3'-phosphate
  modified_base 14: mod_base = OTHER; note = guanosine-3'-phosphate
  modified_base 15: mod_base = OTHER; note = uridine-3'-phosphate
  modified_base 16: mod_base = OTHER; note = guanosine-3'-phosphate
  modified_base 17: mod_base = OTHER; note = guanosine-3'-phosphate
  modified_base 18: mod_base = OTHER; note = uridine-3'-phosphate
  modified_base 19: mod_base = OTHER; note = cytidine-3'-phosphate
  modified_base 20: mod_base = OTHER; note = 2'-deoxythymidine-3'-phosphorothioate
  misc_feature 1..19: note = RNA
  misc_feature 20..21: note = DNA
cctcgatttcccggtggtctt

SEQ ID NO: 331 - DNA, 21 bp, synthetic construct
  source 1..21: mol_type = other DNA
  modified_base 1: mod_base = OTHER; note = guanosine-3'-phosphate
  modified_base 2: mod_base = OTHER; note = adenosine-3'-phosphate
  modified_base 3: mod_base = OTHER; note = 2'-O-methylcytidine-3'-phosphate
  modified_base 4: mod_base = OTHER; note = 2'-O-methylcytidine-3'-phosphate
  modified_base 5: mod_base = OTHER; note = adenosine-3'-phosphate
  modified_base 6: mod_base = OTHER; note = 2'-O-methylcytidine-3'-phosphate
  modified_base 7: mod_base = OTHER; note = 2'-O-methylcytidine-3'-phosphate
  modified_base 8: mod_base = OTHER; note = guanosine-3'-phosphate
  modified_base 9: mod_base = OTHER; note = guanosine-3'-phosphate
  modified_base 10: mod_base = OTHER; note = guanosine-3'-phosphate
  modified_base 11: mod_base = OTHER; note = adenosine-3'-phosphate
  modified_base 12: mod_base = OTHER; note = adenosine-3'-phosphate
  modified_base 13: mod_base = OTHER; note = adenosine-3'-phosphate
  modified_base 14: mod_base = OTHER; note = 2'-O-methyluridine-3'-phosphate
  modified_base 15: mod_base = OTHER; note = 2'-O-methylcytidine-3'-phosphate
  modified_base 16: mod_base = OTHER; note = guanosine-3'-phosphate
  modified_base 17: mod_base = OTHER; note = adenosine-3'-phosphate
  modified_base 18: mod_base = OTHER; note = guanosine-3'-phosphate
  modified_base 19: mod_base = OTHER; note = guanosine-3'-phosphate
  modified_base 20: mod_base = OTHER; note = 2'-deoxythymidine-3'-phosphorothioate
  misc_feature 1..19: note = RNA
  misc_feature 20..21: note = DNA
gaccaccgggaaatcgaggtt

SEQ ID NO: 332 - DNA, 21 bp, synthetic construct
  source 1..21: mol_type = other DNA
  modified_base 1: mod_base = OTHER; note = cytidine-3'-phosphate
  modified_base 2: mod_base = OTHER; note = cytidine-3'-phosphate
  modified_base 3: mod_base = OTHER; note = uridine-3'-phosphate
  modified_base 4: mod_base = OTHER; note = cytidine-3'-phosphate
  modified_base 5: mod_base = OTHER; note = guanosine-3'-phosphate
  modified_base 6: mod_base = OTHER; note = adenosine-3'-phosphate
  modified_base 7: mod_base = OTHER; note = uridine-3'-phosphate
  modified_base 8: mod_base = OTHER; note = uridine-3'-phosphate
  modified_base 9: mod_base = OTHER; note = uridine-3'-phosphate
  modified_base 10: mod_base = OTHER; note = cytidine-3'-phosphate
  modified_base 11: mod_base = OTHER; note = cytidine-3'-phosphate
  modified_base 12: mod_base = OTHER; note = cytidine-3'-phosphate
  modified_base 13: mod_base = OTHER; note = guanosine-3'-phosphate
  modified_base 14: mod_base = OTHER; note = guanosine-3'-phosphate
  modified_base 15: mod_base = OTHER; note = uridine-3'-phosphate
  modified_base 16: mod_base = OTHER; note = guanosine-3'-phosphate
  modified_base 17: mod_base = OTHER; note = guanosine-3'-phosphate
  modified_base 18: mod_base = OTHER; note = uridine-3'-phosphate
  modified_base 19: mod_base = OTHER; note = cytidine-3'-phosphate
  modified_base 20: mod_base = OTHER; note = 2'-deoxythymidine-3'-phosphorothioate
  misc_feature 1..19: note = RNA
  misc_feature 20..21: note = DNA
cctcgatttcccggtggtctt

SEQ ID NO: 333 - DNA, 21 bp, synthetic construct
  source 1..21: mol_type = other DNA
  modified_base 1: mod_base = OTHER; note = adenosine-3'-phosphate
  modified_base 2: mod_base = OTHER; note = cytidine-3'-phosphate
  modified_base 3: mod_base = OTHER; note = cytidine-3'-phosphate
  modified_base 4: mod_base = OTHER; note = adenosine-3'-phosphate
  modified_base 5: mod_base = OTHER; note = cytidine-3'-phosphate
  modified_base 6: mod_base = OTHER; note = cytidine-3'-phosphate
  modified_base 7: mod_base = OTHER; note = guanosine-3'-phosphate
  modified_base 8: mod_base = OTHER; note = guanosine-3'-phosphate
  modified_base 9: mod_base = OTHER; note = guanosine-3'-phosphate
  modified_base 10: mod_base = OTHER; note = adenosine-3'-phosphate
  modified_base 11: mod_base = OTHER; note = adenosine-3'-phosphate
  modified_base 12: mod_base = OTHER; note = adenosine-3'-phosphate
  modified_base 13: mod_base = OTHER; note = uridine-3'-phosphate
  modified_base 14: mod_base = OTHER; note = cytidine-3'-phosphate
  modified_base 15: mod_base = OTHER; note = guanosine-3'-phosphate
  modified_base 16: mod_base = OTHER; note = adenosine-3'-phosphate
  modified_base 17: mod_base = OTHER; note = guanosine-3'-phosphate
  modified_base 18: mod_base = OTHER; note = guanosine-3'-phosphate
  modified_base 19: mod_base = OTHER; note = guanosine-3'-phosphate
  modified_base 20: mod_base = OTHER; note = 2'-deoxythymidine-3'-phosphorothioate
  misc_feature 1..19: note = RNA
  misc_feature 20..21: note = DNA
accaccgggaaatcgagggtt

SEQ ID NO: 334 - DNA, 21 bp, synthetic construct
  source 1..21: mol_type = other DNA
  modified_base 1: mod_base = OTHER; note = cytidine-3'-phosphate
  modified_base 2: mod_base = OTHER; note = cytidine-3'-phosphate
  modified_base 3: mod_base = OTHER; note = cytidine-3'-phosphate
  modified_base 4: mod_base = OTHER; note = uridine-3'-phosphate
  modified_base 5: mod_base = OTHER; note = cytidine-3'-phosphate
  modified_base 6: mod_base = OTHER; note = guanosine-3'-phosphate
  modified_base 7: mod_base = OTHER; note = adenosine-3'-phosphate
  modified_base 8: mod_base = OTHER; note = uridine-3'-phosphate
  modified_base 9: mod_base = OTHER; note = uridine-3'-phosphate
  modified_base 10: mod_base = OTHER; note = uridine-3'-phosphate
  modified_base 11: mod_base = OTHER; note = cytidine-3'-phosphate
  modified_base 12: mod_base = OTHER; note = cytidine-3'-phosphate
  modified_base 13: mod_base = OTHER; note = cytidine-3'-phosphate
  modified_base 14: mod_base = OTHER; note = guanosine-3'-phosphate
  modified_base 15: mod_base = OTHER; note = guanosine-3'-phosphate
  modified_base 16: mod_base = OTHER; note = uridine-3'-phosphate
  modified_base 17: mod_base = OTHER; note = guanosine-3'-phosphate
  modified_base 18: mod_base = OTHER; note = guanosine-3'-phosphate
  modified_base 19: mod_base = OTHER; note = uridine-3'-phosphate
  modified_base 20: mod_base = OTHER; note = 2'-deoxythymidine-3'-phosphorothioate
  misc_feature 1..19: note = RNA
  misc_feature 20..21: note = DNA
ccctcgatttcccggtggttt

SEQ ID NO: 335 - DNA, 21 bp, synthetic construct
  source 1..21: mol_type = other DNA
  modified_base 1: mod_base = OTHER; note = adenosine-3'-phosphate
  modified_base 2: mod_base = OTHER; note = 2'-O-methylcytidine-3'-phosphate
  modified_base 3: mod_base = OTHER; note = 2'-O-methylcytidine-3'-phosphate
  modified_base 4: mod_base = OTHER; note = adenosine-3'-phosphate
  modified_base 5: mod_base = OTHER; note = 2'-O-methylcytidine-3'-phosphate
  modified_base 6: mod_base = OTHER; note = 2'-O-methylcytidine-3'-phosphate
  modified_base 7: mod_base = OTHER; note = guanosine-3'-phosphate
  modified_base 8: mod_base = OTHER; note = guanosine-3'-phosphate
  modified_base 9: mod_base = OTHER; note = guanosine-3'-phosphate
  modified_base 10: mod_base = OTHER; note = adenosine-3'-phosphate
  modified_base 11: mod_base = OTHER; note = adenosine-3'-phosphate
  modified_base 12: mod_base = OTHER; note = adenosine-3'-phosphate
  modified_base 13: mod_base = OTHER; note = 2'-O-methyluridine-3'-phosphate
  modified_base 14: mod_base = OTHER; note = 2'-O-methylcytidine-3'-phosphate
  modified_base 15: mod_base = OTHER; note = guanosine-3'-phosphate
  modified_base 16: mod_base = OTHER; note = adenosine-3'-phosphate
  modified_base 17: mod_base = OTHER; note = guanosine-3'-phosphate
  modified_base 18: mod_base = OTHER; note = guanosine-3'-phosphate
  modified_base 19: mod_base = OTHER; note = guanosine-3'-phosphate
  modified_base 20: mod_base = OTHER; note = 2'-deoxythymidine-3'-phosphorothioate
  misc_feature 1..19: note = RNA
  misc_feature 20..21: note = DNA
accaccgggaaatcgagggtt

SEQ ID NO: 336 - DNA, 21 bp, synthetic construct
  source 1..21: mol_type = other DNA
  modified_base 1: mod_base = OTHER; note = cytidine-3'-phosphate
  modified_base 2: mod_base = OTHER; note = cytidine-3'-phosphate
  modified_base 3: mod_base = OTHER; note = cytidine-3'-phosphate
  modified_base 4: mod_base = OTHER; note = uridine-3'-phosphate
  modified_base 5: mod_base = OTHER; note = cytidine-3'-phosphate
  modified_base 6: mod_base = OTHER; note = guanosine-3'-phosphate
  modified_base 7: mod_base = OTHER; note = adenosine-3'-phosphate
  modified_base 8: mod_base = OTHER; note = uridine-3'-phosphate
  modified_base 9: mod_base = OTHER; note = uridine-3'-phosphate
  modified_base 10: mod_base = OTHER; note = uridine-3'-phosphate
  modified_base 11: mod_base = OTHER; note = cytidine-3'-phosphate
  modified_base 12: mod_base = OTHER; note = cytidine-3'-phosphate
  modified_base 13: mod_base = OTHER; note = cytidine-3'-phosphate
  modified_base 14: mod_base = OTHER; note = guanosine-3'-phosphate
  modified_base 15: mod_base = OTHER; note = guanosine-3'-phosphate
  modified_base 16: mod_base = OTHER; note = uridine-3'-phosphate
  modified_base 17: mod_base = OTHER; note = guanosine-3'-phosphate
  modified_base 18: mod_base = OTHER; note = guanosine-3'-phosphate
  modified_base 19: mod_base = OTHER; note = uridine-3'-phosphate
  modified_base 20: mod_base = OTHER; note = 2'-deoxythymidine-3'-phosphorothioate
  misc_feature 1..19: note = RNA
  misc_feature 20..21: note = DNA
ccctcgatttcccggtggttt

SEQ ID NO: 337 - DNA, 21 bp, synthetic construct
  source 1..21: mol_type = other DNA
  modified_base 1: mod_base = OTHER; note = cytidine-3'-phosphate
  modified_base 2: mod_base = OTHER; note = cytidine-3'-phosphate
  modified_base 3: mod_base = OTHER; note = adenosine-3'-phosphate
  modified_base 4: mod_base = OTHER; note = cytidine-3'-phosphate
  modified_base 5: mod_base = OTHER; note = cytidine-3'-phosphate
  modified_base 6: mod_base = OTHER; note = guanosine-3'-phosphate
  modified_base 7: mod_base = OTHER; note = guanosine-3'-phosphate
  modified_base 8: mod_base = OTHER; note = guanosine-3'-phosphate
  modified_base 9: mod_base = OTHER; note = adenosine-3'-phosphate
  modified_base 10: mod_base = OTHER; note = adenosine-3'-phosphate
  modified_base 11: mod_base = OTHER; note = adenosine-3'-phosphate
  modified_base 12: mod_base = OTHER; note = uridine-3'-phosphate
  modified_base 13: mod_base = OTHER; note = cytidine-3'-phosphate
  modified_base 14: mod_base = OTHER; note = guanosine-3'-phosphate
  modified_base 15: mod_base = OTHER; note = adenosine-3'-phosphate
  modified_base 16: mod_base = OTHER; note = guanosine-3'-phosphate
  modified_base 17: mod_base = OTHER; note = guanosine-3'-phosphate
  modified_base 18: mod_base = OTHER; note = guanosine-3'-phosphate
  modified_base 19: mod_base = OTHER; note = cytidine-3'-phosphate
  modified_base 20: mod_base = OTHER; note = 2'-deoxythymidine-3'-phosphorothioate
  misc_feature 1..19: note = RNA
  misc_feature 20..21: note = DNA
ccaccgggaaatcgagggctt

SEQ ID NO: 338 - DNA, 21 bp, synthetic construct
  source 1..21: mol_type = other DNA
  modified_base 1: mod_base = OTHER; note = guanosine-3'-phosphate
  modified_base 2: mod_base = OTHER; note = cytidine-3'-phosphate
  modified_base 3: mod_base = OTHER; note = cytidine-3'-phosphate
  modified_base 4: mod_base = OTHER; note = cytidine-3'-phosphate
  modified_base 5: mod_base = OTHER; note = uridine-3'-phosphate
  modified_base 6: mod_base = OTHER; note = cytidine-3'-phosphate
  modified_base 7: mod_base = OTHER; note = guanosine-3'-phosphate
  modified_base 8: mod_base = OTHER; note = adenosine-3'-phosphate
  modified_base 9: mod_base = OTHER; note = uridine-3'-phosphate
  modified_base 10: mod_base = OTHER; note = uridine-3'-phosphate
  modified_base 11: mod_base = OTHER; note = uridine-3'-phosphate
  modified_base 12: mod_base = OTHER; note = cytidine-3'-phosphate
  modified_base 13: mod_base = OTHER; note = cytidine-3'-phosphate
  modified_base 14: mod_base = OTHER; note = cytidine-3'-phosphate
  modified_base 15: mod_base = OTHER; note = guanosine-3'-phosphate
  modified_base 16: mod_base = OTHER; note = guanosine-3'-phosphate
  modified_base 17: mod_base = OTHER; note = uridine-3'-phosphate
  modified_base 18: mod_base = OTHER; note = guanosine-3'-phosphate
  modified_base 19: mod_base = OTHER; note = guanosine-3'-phosphate
  modified_base 20: mod_base = OTHER; note = 2'-deoxythymidine-3'-phosphorothioate
  misc_feature 1..19: note = RNA
  misc_feature 20..21: note = DNA
gccctcgatttcccggtggtt

SEQ ID NO: 339 - DNA, 21 bp, synthetic construct
  source 1..21: mol_type = other DNA
  modified_base 1: mod_base = OTHER; note = 2'-O-methylcytidine-3'-phosphate
  modified_base 2: mod_base = OTHER; note = 2'-O-methylcytidine-3'-phosphate
  modified_base 3: mod_base = OTHER; note = adenosine-3'-phosphate
  modified_base 4: mod_base = OTHER; note = 2'-O-methylcytidine-3'-phosphate
  modified_base 5: mod_base = OTHER; note = 2'-O-methylcytidine-3'-phosphate
  modified_base 6: mod_base = OTHER; note = guanosine-3'-phosphate
  modified_base 7: mod_base = OTHER; note = guanosine-3'-phosphate
  modified_base 8: mod_base = OTHER; note = guanosine-3'-phosphate
  modified_base 9: mod_base = OTHER; note = adenosine-3'-phosphate
  modified_base 10: mod_base = OTHER; note = adenosine-3'-phosphate
  modified_base 11: mod_base = OTHER; note = adenosine-3'-phosphate
  modified_base 12: mod_base = OTHER; note = 2'-O-methyluridine-3'-phosphate
  modified_base 13: mod_base = OTHER; note = 2'-O-methylcytidine-3'-phosphate
  modified_base 14: mod_base = OTHER; note = guanosine-3'-phosphate
  modified_base 15: mod_base = OTHER; note = adenosine-3'-phosphate
  modified_base 16: mod_base = OTHER; note = guanosine-3'-phosphate
  modified_base 17: mod_base = OTHER; note = guanosine-3'-phosphate
  modified_base 18: mod_base = OTHER; note = guanosine-3'-phosphate
  modified_base 19: mod_base = OTHER; note = 2'-O-methylcytidine-3'-phosphate
  modified_base 20: mod_base = OTHER; note = 2'-deoxythymidine-3'-phosphorothioate
  misc_feature 1..19: note = RNA
  misc_feature 20..21: note = DNA
ccaccgggaaatcgagggctt

SEQ ID NO: 340 - DNA, 21 bp, synthetic construct
  source 1..21: mol_type = other DNA
  modified_base 1: mod_base = OTHER; note = guanosine-3'-phosphate
  modified_base 2: mod_base = OTHER; note = cytidine-3'-phosphate
  modified_base 3: mod_base = OTHER; note = cytidine-3'-phosphate
  modified_base 4: mod_base = OTHER; note = cytidine-3'-phosphate
  modified_base 5: mod_base = OTHER; note = uridine-3'-phosphate
  modified_base 6: mod_base = OTHER; note = cytidine-3'-phosphate
  modified_base 7: mod_base = OTHER; note = guanosine-3'-phosphate
  modified_base 8: mod_base = OTHER; note = adenosine-3'-phosphate
  modified_base 9: mod_base = OTHER; note = uridine-3'-phosphate
  modified_base 10: mod_base = OTHER; note = uridine-3'-phosphate
  modified_base 11: mod_base = OTHER; note = uridine-3'-phosphate
  modified_base 12: mod_base = OTHER; note = cytidine-3'-phosphate
  modified_base 13: mod_base = OTHER; note = cytidine-3'-phosphate
  modified_base 14: mod_base = OTHER; note = cytidine-3'-phosphate
  modified_base 15: mod_base = OTHER; note = guanosine-3'-phosphate
  modified_base 16: mod_base = OTHER; note = guanosine-3'-phosphate
  modified_base 17: mod_base = OTHER; note = uridine-3'-phosphate
  modified_base 18: mod_base = OTHER; note = guanosine-3'-phosphate
  modified_base 19: mod_base = OTHER; note = guanosine-3'-phosphate
  modified_base 20: mod_base = OTHER; note = 2'-deoxythymidine-3'-phosphorothioate
  misc_feature 1..19: note = RNA
  misc_feature 20..21: note = DNA
gccctcgatttcccggtggtt

SEQ ID NO: 341 - DNA, 21 bp, synthetic construct
  source 1..21: mol_type = other DNA
  modified_base 1: mod_base = OTHER; note = adenosine-3'-phosphate
  modified_base 2: mod_base = OTHER; note = adenosine-3'-phosphate
  modified_base 3: mod_base = OTHER; note = adenosine-3'-phosphate
  modified_base 4: mod_base = OTHER; note = uridine-3'-phosphate
  modified_base 5: mod_base = OTHER; note = cytidine-3'-phosphate
  modified_base 6: mod_base = OTHER; note = guanosine-3'-phosphate
  modified_base 7: mod_base = OTHER; note = adenosine-3'-phosphate
  modified_base 8: mod_base = OTHER; note = guanosine-3'-phosphate
  modified_base 9: mod_base = OTHER; note = guanosine-3'-phosphate
  modified_base 10: mod_base = OTHER; note = guanosine-3'-phosphate
  modified_base 11: mod_base = OTHER; note = cytidine-3'-phosphate
  modified_base 12: mod_base = OTHER; note = adenosine-3'-phosphate
  modified_base 13: mod_base = OTHER; note = guanosine-3'-phosphate
  modified_base 14: mod_base = OTHER; note = guanosine-3'-phosphate
  modified_base 15: mod_base = OTHER; note = guanosine-3'-phosphate
  modified_base 16: mod_base = OTHER; note = uridine-3'-phosphate
  modified_base 17: mod_base = OTHER; note = cytidine-3'-phosphate
  modified_base 18: mod_base = OTHER; note = adenosine-3'-phosphate
  modified_base 19: mod_base = OTHER; note = uridine-3'-phosphate
  modified_base 20: mod_base = OTHER; note = 2'-deoxythymidine-3'-phosphorothioate
  misc_feature 1..19: note = RNA
  misc_feature 20..21: note = DNA
aaatcgagggcagggtcattt

SEQ ID NO: 342 - DNA, 21 bp, synthetic construct
  source 1..21: mol_type = other DNA
  modified_base 1: mod_base = OTHER; note = adenosine-3'-phosphate
  modified_base 2: mod_base = OTHER; note = uridine-3'-phosphate
  modified_base 3: mod_base = OTHER; note = guanosine-3'-phosphate
  modified_base 4: mod_base = OTHER; note = adenosine-3'-phosphate
  modified_base 5: mod_base = OTHER; note = cytidine-3'-phosphate
  modified_base 6: mod_base = OTHER; note = cytidine-3'-phosphate
  modified_base 7: mod_base = OTHER; note = cytidine-3'-phosphate
  modified_base 8: mod_base = OTHER; note = uridine-3'-phosphate
  modified_base 9: mod_base = OTHER; note = guanosine-3'-phosphate
  modified_base 10: mod_base = OTHER; note = cytidine-3'-phosphate
  modified_base 11: mod_base = OTHER; note = cytidine-3'-phosphate
  modified_base 12: mod_base = OTHER; note = cytidine-3'-phosphate
  modified_base 13: mod_base = OTHER; note = uridine-3'-phosphate
  modified_base 14: mod_base = OTHER; note = cytidine-3'-phosphate
  modified_base 15: mod_base = OTHER; note = guanosine-3'-phosphate
  modified_base 16: mod_base = OTHER; note = adenosine-3'-phosphate
  modified_base 17: mod_base = OTHER; note = uridine-3'-phosphate
  modified_base 18: mod_base = OTHER; note = uridine-3'-phosphate
  modified_base 19: mod_base = OTHER; note = uridine-3'-phosphate
  modified_base 20: mod_base = OTHER; note = 2'-deoxythymidine-3'-phosphorothioate
  misc_feature 1..19: note = RNA
  misc_feature 20..21: note = DNA
atgaccctgccctcgattttt

SEQ ID NO: 343 - DNA, 21 bp, synthetic construct
  source 1..21: mol_type = other DNA
  modified_base 1: mod_base = OTHER; note = adenosine-3'-phosphate
  modified_base 2: mod_base = OTHER; note = adenosine-3'-phosphate
  modified_base 3: mod_base = OTHER; note = adenosine-3'-phosphate
  modified_base 4: mod_base = OTHER; note = 2'-O-methyluridine-3'-phosphate
  modified_base 5: mod_base = OTHER; note = 2'-O-methylcytidine-3'-phosphate
  modified_base 6: mod_base = OTHER; note = guanosine-3'-phosphate
  modified_base 7: mod_base = OTHER; note = adenosine-3'-phosphate
  modified_base 8: mod_base = OTHER; note = guanosine-3'-phosphate
  modified_base 9: mod_base = OTHER; note = guanosine-3'-phosphate
  modified_base 10: mod_base = OTHER; note = guanosine-3'-phosphate
  modified_base 11: mod_base = OTHER; note = 2'-O-methylcytidine-3'-phosphate
  modified_base 12: mod_base = OTHER; note = adenosine-3'-phosphate
  modified_base 13: mod_base = OTHER; note = guanosine-3'-phosphate
  modified_base 14: mod_base = OTHER; note = guanosine-3'-phosphate
  modified_base 15: mod_base = OTHER; note = guanosine-3'-phosphate
  modified_base 16: mod_base = OTHER; note = 2'-O-methyluridine-3'-phosphate
  modified_base 17: mod_base = OTHER; note = 2'-O-methylcytidine-3'-phosphate
  modified_base 18: mod_base = OTHER; note = adenosine-3'-phosphate
  modified_base 19: mod_base = OTHER; note = 2'-O-methyluridine-3'-phosphate
  modified_base 20: mod_base = OTHER; note = 2'-deoxythymidine-3'-phosphorothioate
  misc_feature 1..19: note = RNA
  misc_feature 20..21: note = DNA
aaatcgagggcagggtcattt

SEQ ID NO: 344 - DNA, 21 bp, synthetic construct
  source 1..21: mol_type = other DNA
  modified_base 1: mod_base = OTHER; note = adenosine-3'-phosphate
  modified_base 2: mod_base = OTHER; note = uridine-3'-phosphate
  modified_base 3: mod_base = OTHER; note = guanosine-3'-phosphate
  modified_base 4: mod_base = OTHER; note = adenosine-3'-phosphate
  modified_base 5: mod_base = OTHER; note = cytidine-3'-phosphate
  modified_base 6: mod_base = OTHER; note = cytidine-3'-phosphate
  modified_base 7: mod_base = OTHER; note = cytidine-3'-phosphate
  modified_base 8: mod_base = OTHER; note = uridine-3'-phosphate
  modified_base 9: mod_base = OTHER; note = guanosine-3'-phosphate
  modified_base 10: mod_base = OTHER; note = cytidine-3'-phosphate
  modified_base 11: mod_base = OTHER; note = cytidine-3'-phosphate
  modified_base 12: mod_base = OTHER; note = cytidine-3'-phosphate
  modified_base 13: mod_base = OTHER; note = uridine-3'-phosphate
  modified_base 14: mod_base = OTHER; note = cytidine-3'-phosphate
  modified_base 15: mod_base = OTHER; note = guanosine-3'-phosphate
  modified_base 16: mod_base = OTHER; note = adenosine-3'-phosphate
  modified_base 17: mod_base = OTHER; note = uridine-3'-phosphate
  modified_base 18: mod_base = OTHER; note = uridine-3'-phosphate
  modified_base 19: mod_base = OTHER; note = uridine-3'-phosphate
  modified_base 20: mod_base = OTHER; note = 2'-deoxythymidine-3'-phosphorothioate
  misc_feature 1..19: note = RNA
  misc_feature 20..21: note = DNA
atgaccctgccctcgattttt

SEQ ID NO: 345 - DNA, 21 bp, synthetic construct
  source 1..21: mol_type = other DNA
  modified_base 1: mod_base = OTHER; note = 2'-deoxy-2'-fluoroadenosine-3'-phosphate
  modified_base 2: mod_base = OTHER; note = 2'-O-methyladenosine-3'-phosphate
  modified_base 3: mod_base = OTHER; note = 2'-deoxy-2'-fluoroadenosine-3'-phosphate
  modified_base 4: mod_base = OTHER; note = 2'-O-methyluridine-3'-phosphate
  modified_base 5: mod_base = OTHER; note = 2'-deoxy-2'-fluorocytidine-3'-phosphate
  modified_base 6: mod_base = OTHER; note = 2'-O-methylguanosine-3'-phosphate
  modified_base 7: mod_base = OTHER; note = 2'-deoxy-2'-fluoroadenosine-3'-phosphate
  modified_base 8: mod_base = OTHER; note = 2'-O-methylguanosine-3'-phosphate
  modified_base 9: mod_base = OTHER; note = 2'-deoxy-2'-fluoroguanosine-3'-phosphate
  modified_base 10: mod_base = OTHER; note = 2'-O-methylguanosine-3'-phosphate
  modified_base 11: mod_base = OTHER; note = 2'-deoxy-2'-fluorocytidine-3'-phosphate
  modified_base 12: mod_base = OTHER; note = 2'-O-methyladenosine-3'-phosphate
  modified_base 13: mod_base = OTHER; note = 2'-deoxy-2'-fluoroguanosine-3'-phosphate
  modified_base 14: mod_base = OTHER; note = 2'-O-methylguanosine-3'-phosphate
  modified_base 15: mod_base = OTHER; note = 2'-deoxy-2'-fluoroguanosine-3'-phosphate
  modified_base 16: mod_base = OTHER; note = 2'-O-methyluridine-3'-phosphate
  modified_base 17: mod_base = OTHER; note = 2'-deoxy-2'-fluorocytidine-3'-phosphate
  modified_base 18: mod_base = OTHER; note = 2'-O-methyladenosine-3'-phosphate
  modified_base 19: mod_base = OTHER; note = 2'-deoxy-2'-fluorouridine-3'-phosphate
  modified_base 20: mod_base = OTHER; note = 2'-deoxythymidine-3'-phosphorothioate
  misc_feature 1..19: note = RNA
  misc_feature 20..21: note = DNA
aaatcgagggcagggtcattt

SEQ ID NO: 346 - DNA, 21 bp, synthetic construct
  source 1..21: mol_type = other DNA
  modified_base 1: mod_base = OTHER; note = 2'-O-methyladenosine-3'-phosphate 5'phosphate
  modified_base 2: mod_base = OTHER; note = 2'-deoxy-2'-fluorouridine-3'-phosphate
  modified_base 3: mod_base = OTHER; note = 2'-O-methylguanosine-3'-phosphate
  modified_base 4: mod_base = OTHER; note = 2'-deoxy-2'-fluoroadenosine-3'-phosphate
  modified_base 5: mod_base = OTHER; note = 2'-O-methylcytidine-3'-phosphate
  modified_base 6: mod_base = OTHER; note = 2'-deoxy-2'-fluorocytidine-3'-phosphate
  modified_base 7: mod_base = OTHER; note = 2'-O-methylcytidine-3'-phosphate
  modified_base 8: mod_base = OTHER; note = 2'-deoxy-2'-fluorouridine-3'-phosphate
  modified_base 9: mod_base = OTHER; note = 2'-O-methylguanosine-3'-phosphate
  modified_base 10: mod_base = OTHER; note = 2'-deoxy-2'-fluorocytidine-3'-phosphate
  modified_base 11: mod_base = OTHER; note = 2'-O-methylcytidine-3'-phosphate
  modified_base 12: mod_base = OTHER; note = 2'-deoxy-2'-fluorocytidine-3'-phosphate
  modified_base 13: mod_base = OTHER; note = 2'-O-methyluridine-3'-phosphate
  modified_base 14: mod_base = OTHER; note = 2'-deoxy-2'-fluorocytidine-3'-phosphate
  modified_base 15: mod_base = OTHER; note = 2'-O-methylguanosine-3'-phosphate
  modified_base 16: mod_base = OTHER; note = 2'-deoxy-2'-fluoroadenosine-3'-phosphate
  modified_base 17: mod_base = OTHER; note = 2'-O-methyluridine-3'-phosphate
  modified_base 18: mod_base = OTHER; note = 2'-deoxy-2'-fluorouridine-3'-phosphate
  modified_base 19: mod_base = OTHER; note = 2'-O-methyluridine-3'-phosphate
  modified_base 20: mod_base = OTHER; note = 2'-deoxythymidine-3'-phosphorothioate
  misc_feature 1..19: note = RNA
  misc_feature 20..21: note = DNA
atgaccctgccctcgattttt

SEQ ID NO: 347 - DNA, 21 bp, synthetic construct
  source 1..21: mol_type = other DNA
  modified_base 1: mod_base = OTHER; note = adenosine-3'-phosphate
  modified_base 2: mod_base = OTHER; note = adenosine-3'-phosphate
  modified_base 3: mod_base = OTHER; note = adenosine-3'-phosphate
  modified_base 4: mod_base = OTHER; note = 2'-deoxy-2'-fluorouridine-3'-phosphate
  modified_base 5: mod_base = OTHER; note = 2'-deoxy-2'-fluorocytidine-3'-phosphate
  modified_base 6: mod_base = OTHER; note = guanosine-3'-phosphate
  modified_base 7: mod_base = OTHER; note = adenosine-3'-phosphate
  modified_base 8: mod_base = OTHER; note = guanosine-3'-phosphate
  modified_base 9: mod_base = OTHER; note = guanosine-3'-phosphate
  modified_base 10: mod_base = OTHER; note = guanosine-3'-phosphate
  modified_base 11: mod_base = OTHER; note = 2'-deoxy-2'-fluorocytidine-3'-phosphate
  modified_base 12: mod_base = OTHER; note = adenosine-3'-phosphate
  modified_base 13: mod_base = OTHER; note = guanosine-3'-phosphate
  modified_base 14: mod_base = OTHER; note = guanosine-3'-phosphate
  modified_base 15: mod_base = OTHER; note = guanosine-3'-phosphate
  modified_base 16: mod_base = OTHER; note = 2'-deoxy-2'-fluorouridine-3'-phosphate
  modified_base 17: mod_base = OTHER; note = 2'-deoxy-2'-fluorocytidine-3'-phosphate
  modified_base 18: mod_base = OTHER; note = adenosine-3'-phosphate
  modified_base 19: mod_base = OTHER; note = 2'-deoxy-2'-fluorouridine-3'-phosphate
  modified_base 20: mod_base = OTHER; note = 2'-deoxythymidine-3'-phosphorothioate
  misc_feature 1..19: note = RNA
  misc_feature 20..21: note = DNA
aaatcgagggcagggtcattt

SEQ ID NO: 348 - DNA, 21 bp, synthetic construct
  source 1..21: mol_type = other DNA
  modified_base 1: mod_base = OTHER; note = adenosine-3'-phosphate
  modified_base 2: mod_base = OTHER; note = 2'-deoxy-2'-fluorouridine-3'-phosphate
  modified_base 3: mod_base = OTHER; note = guanosine-3'-phosphate
  modified_base 4: mod_base = OTHER; note = adenosine-3'-phosphate
  modified_base 5: mod_base = OTHER; note = 2'-deoxy-2'-fluorocytidine-3'-phosphate
  modified_base 6: mod_base = OTHER; note = 2'-deoxy-2'-fluorocytidine-3'-phosphate
  modified_base 7: mod_base = OTHER; note = 2'-deoxy-2'-fluorocytidine-3'-phosphate
  modified_base 8: mod_base = OTHER; note = 2'-deoxy-2'-fluorouridine-3'-phosphate
  modified_base 9: mod_base = OTHER; note = guanosine-3'-phosphate
  modified_base 10: mod_base = OTHER; note = 2'-deoxy-2'-fluorocytidine-3'-phosphate
  modified_base 11: mod_base = OTHER; note = 2'-deoxy-2'-fluorocytidine-3'-phosphate
  modified_base 12: mod_base = OTHER; note = 2'-deoxy-2'-fluorocytidine-3'-phosphate
  modified_base 13: mod_base = OTHER; note = 2'-deoxy-2'-fluorouridine-3'-phosphate
  modified_base 14: mod_base = OTHER; note = 2'-deoxy-2'-fluorocytidine-3'-phosphate
  modified_base 15: mod_base = OTHER; note = guanosine-3'-phosphate
  modified_base 16: mod_base = OTHER; note = adenosine-3'-phosphate
  modified_base 17: mod_base = OTHER; note = 2'-deoxy-2'-fluorouridine-3'-phosphate
  modified_base 18: mod_base = OTHER; note = 2'-deoxy-2'-fluorouridine-3'-phosphate
  modified_base 19: mod_base = OTHER; note = 2'-deoxy-2'-fluorouridine-3'-phosphate
  modified_base 20: mod_base = OTHER; note = 2'-deoxythymidine-3'-phosphorothioate
  misc_feature 1..19: note = RNA
  misc_feature 20..21: note = DNA
atgaccctgccctcgattttt

SEQ ID NO: 349 - DNA, 21 bp, synthetic construct
  source 1..21: mol_type = other DNA
  modified_base 1: mod_base = OTHER; note = adenosine-3'-phosphate
  modified_base 2: mod_base = OTHER; note = 2'-O-methyladenosine-3'-phosphate
  modified_base 3: mod_base = OTHER; note = adenosine-3'-phosphate
  modified_base 4: mod_base = OTHER; note = 2'-O-methyluridine-3'-phosphate
  modified_base 5: mod_base = OTHER; note = cytidine-3'-phosphate
  modified_base 6: mod_base = OTHER; note = 2'-O-methylguanosine-3'-phosphate
  modified_base 7: mod_base = OTHER; note = adenosine-3'-phosphate
  modified_base 8: mod_base = OTHER; note = 2'-O-methylguanosine-3'-phosphate
  modified_base 9: mod_base = OTHER; note = guanosine-3'-phosphate
  modified_base 10: mod_base = OTHER; note = 2'-O-methylguanosine-3'-phosphate
  modified_base 11: mod_base = OTHER; note = cytidine-3'-phosphate
  modified_base 12: mod_base = OTHER; note = 2'-O-methyladenosine-3'-phosphate
  modified_base 13: mod_base = OTHER; note = guanosine-3'-phosphate
  modified_base 14: mod_base = OTHER; note = 2'-O-methylguanosine-3'-phosphate
  modified_base 15: mod_base = OTHER; note = guanosine-3'-phosphate
  modified_base 16: mod_base = OTHER; note = 2'-O-methyluridine-3'-phosphate
  modified_base 17: mod_base = OTHER; note = cytidine-3'-phosphate
  modified_base 18: mod_base = OTHER; note = 2'-O-methyladenosine-3'-phosphate
  modified_base 19: mod_base = OTHER; note = uridine-3'-phosphate
  modified_base 20: mod_base = OTHER; note = 2'-deoxythymidine-3'-phosphorothioate
  misc_feature 1..19: note = RNA
  misc_feature 20..21: note = DNA
aaatcgagggcagggtcattt

SEQ ID NO: 350 - DNA, 21 bp, synthetic construct
  source 1..21: mol_type = other DNA
  modified_base 1: mod_base = OTHER; note = 2'-O-methyladenosine-3'-phosphate 5'phosphate
  modified_base 2: mod_base = OTHER; note = 2'-deoxy-2'-fluorouridine-3'-phosphate
  modified_base 3: mod_base = OTHER; note = 2'-O-methylguanosine-3'-phosphate
  modified_base 4: mod_base = OTHER; note = 2'-deoxy-2'-fluoroadenosine-3'-phosphate
  modified_base 5: mod_base = OTHER; note = 2'-O-methylcytidine-3'-phosphate
  modified_base 6: mod_base = OTHER; note = 2'-deoxy-2'-fluorocytidine-3'-phosphate
  modified_base 7: mod_base = OTHER; note = 2'-O-methylcytidine-3'-phosphate
  modified_base 8: mod_base = OTHER; note = 2'-deoxy-2'-fluorouridine-3'-phosphate
  modified_base 9: mod_base = OTHER; note = 2'-O-methylguanosine-3'-phosphate
  modified_base 10: mod_base = OTHER; note = 2'-deoxy-2'-fluorocytidine-3'-phosphate
  modified_base 11: mod_base = OTHER; note = 2'-O-methylcytidine-3'-phosphate
  modified_base 12: mod_base = OTHER; note = 2'-deoxy-2'-fluorocytidine-3'-phosphate
  modified_base 13: mod_base = OTHER; note = 2'-O-methyluridine-3'-phosphate
  modified_base 14: mod_base = OTHER; note = 2'-deoxy-2'-fluorocytidine-3'-phosphate
  modified_base 15: mod_base = OTHER; note = 2'-O-methylguanosine-3'-phosphate
  modified_base 16: mod_base = OTHER; note = 2'-deoxy-2'-fluoroadenosine-3'-phosphate
  modified_base 17: mod_base = OTHER; note = 2'-O-methyluridine-3'-phosphate
  modified_base 18: mod_base = OTHER; note = 2'-deoxy-2'-fluorouridine-3'-phosphate
  modified_base 19: mod_base = OTHER; note = 2'-O-methyluridine-3'-phosphate
  modified_base 20: mod_base = OTHER; note = 2'-deoxythymidine-3'-phosphorothioate
  misc_feature 1..19: note = RNA
  misc_feature 20..21: note = DNA
atgaccctgccctcgattttt

SEQ ID NO: 351 - DNA, 21 bp, synthetic construct
  source 1..21: mol_type = other DNA
  modified_base 1: mod_base = OTHER; note = adenosine-3'-phosphate
  modified_base 2: mod_base = OTHER; note = 2'-O-methyladenosine-3'-phosphate
  modified_base 3: mod_base = OTHER; note = adenosine-3'-phosphate
  modified_base 4: mod_base = OTHER; note = 2'-O-methyluridine-3'-phosphate
  modified_base 5: mod_base = OTHER; note = cytidine-3'-phosphate
  modified_base 6: mod_base = OTHER; note = 2'-O-methylguanosine-3'-phosphate
  modified_base 7: mod_base = OTHER; note = adenosine-3'-phosphate
  modified_base 8: mod_base = OTHER; note = 2'-O-methylguanosine-3'-phosphate
  modified_base 9: mod_base = OTHER; note = guanosine-3'-phosphate
  modified_base 10: mod_base = OTHER; note = 2'-O-methylguanosine-3'-phosphate
  modified_base 11: mod_base = OTHER; note = cytidine-3'-phosphate
  modified_base 12: mod_base = OTHER; note = 2'-O-methyladenosine-3'-phosphate
  modified_base 13: mod_base = OTHER; note = guanosine-3'-phosphate
  modified_base 14: mod_base = OTHER; note = 2'-O-methylguanosine-3'-phosphate
  modified_base 15: mod_base = OTHER; note = guanosine-3'-phosphate
  modified_base 16: mod_base = OTHER; note = 2'-O-methyluridine-3'-phosphate
  modified_base 17: mod_base = OTHER; note = cytidine-3'-phosphate
  modified_base 18: mod_base = OTHER; note = 2'-O-methyladenosine-3'-phosphate
  modified_base 19: mod_base = OTHER; note = uridine-3'-phosphate
  modified_base 20: mod_base = OTHER; note = 2'-deoxythymidine-3'-phosphorothioate
  misc_feature 1..19: note = RNA
  misc_feature 20..21: note = DNA
aaatcgagggcagggtcattt

SEQ ID NO: 352 - DNA, 21 bp, synthetic construct
  source 1..21: mol_type = other DNA
  modified_base 1: mod_base = OTHER; note = adenosine-3'-phosphate
  modified_base 2: mod_base = OTHER; note = 2'-deoxy-2'-fluorouridine-3'-phosphate
  modified_base 3: mod_base = OTHER; note = guanosine-3'-phosphate
  modified_base 4: mod_base = OTHER; note = adenosine-3'-phosphate
  modified_base 5: mod_base = OTHER; note = 2'-deoxy-2'-fluorocytidine-3'-phosphate
  modified_base 6: mod_base = OTHER; note = 2'-deoxy-2'-fluorocytidine-3'-phosphate
  modified_base 7: mod_base = OTHER; note = 2'-deoxy-2'-fluorocytidine-3'-phosphate
  modified_base 8: mod_base = OTHER; note = 2'-deoxy-2'-fluorouridine-3'-phosphate
  modified_base 9: mod_base = OTHER; note = guanosine-3'-phosphate
  modified_base 10: mod_base = OTHER; note = 2'-deoxy-2'-fluorocytidine-3'-phosphate
  modified_base 11: mod_base = OTHER; note = 2'-deoxy-2'-fluorocytidine-3'-phosphate
  modified_base 12: mod_base = OTHER; note = 2'-deoxy-2'-fluorocytidine-3'-phosphate
  modified_base 13: mod_base = OTHER; note = 2'-deoxy-2'-fluorouridine-3'-phosphate
  modified_base 14: mod_base = OTHER; note = 2'-deoxy-2'-fluorocytidine-3'-phosphate
  modified_base 15: mod_base = OTHER; note = guanosine-3'-phosphate
  modified_base 16: mod_base = OTHER; note = adenosine-3'-phosphate
  modified_base 17: mod_base = OTHER; note = 2'-deoxy-2'-fluorouridine-3'-phosphate
  modified_base 18: mod_base = OTHER; note = 2'-deoxy-2'-fluorouridine-3'-phosphate
  modified_base 19: mod_base = OTHER; note = 2'-deoxy-2'-fluorouridine-3'-phosphate
  modified_base 20: mod_base = OTHER; note = 2'-deoxythymidine-3'-phosphorothioate
  misc_feature 1..19: note = RNA
  misc_feature 20..21: note = DNA
atgaccctgccctcgattttt

SEQ ID NO: 353 - DNA, 21 bp, synthetic construct
  source 1..21: mol_type = other DNA
  modified_base 1: mod_base = OTHER; note = 2'-deoxy-2'-fluoroadenosine-3'-phosphate
  modified_base 2: mod_base = OTHER; note = 2'-O-methyladenosine-3'-phosphate
  modified_base 3: mod_base = OTHER; note = 2'-deoxy-2'-fluoroadenosine-3'-phosphate
  modified_base 4: mod_base = OTHER; note = 2'-O-methyluridine-3'-phosphate
  modified_base 5: mod_base = OTHER; note = 2'-deoxy-2'-fluorocytidine-3'-phosphate
  modified_base 6: mod_base = OTHER; note = 2'-O-methylguanosine-3'-phosphate
  modified_base 7: mod_base = OTHER; note = 2'-deoxy-2'-fluoroadenosine-3'-phosphate
  modified_base 8: mod_base = OTHER; note = 2'-O-methylguanosine-3'-phosphate
  modified_base 9: mod_base = OTHER; note = 2'-deoxy-2'-fluoroguanosine-3'-phosphate
  modified_base 10: mod_base = OTHER; note = 2'-O-methylguanosine-3'-phosphate
  modified_base 11: mod_base = OTHER; note = 2'-deoxy-2'-fluorocytidine-3'-phosphate
  modified_base 12: mod_base = OTHER; note = 2'-O-methyladenosine-3'-phosphate
  modified_base 13: mod_base = OTHER; note = 2'-deoxy-2'-fluoroguanosine-3'-phosphate
  modified_base 14: mod_base = OTHER; note = 2'-O-methylguanosine-3'-phosphate
  modified_base 15: mod_base = OTHER; note = 2'-deoxy-2'-fluoroguanosine-3'-phosphate
  modified_base 16: mod_base = OTHER; note = 2'-O-methyluridine-3'-phosphate
  modified_base 17: mod_base = OTHER; note = 2'-deoxy-2'-fluorocytidine-3'-phosphate
  modified_base 18: mod_base = OTHER; note = 2'-O-methyladenosine-3'-phosphate
  modified_base 19: mod_base = OTHER; note = 2'-deoxy-2'-fluorouridine-3'-phosphate
  modified_base 20: mod_base = OTHER; note = 2'-deoxythymidine-3'-phosphorothioate
  misc_feature 1..19: note = RNA
  misc_feature 20..21: note = DNA
aaatcgagggcagggtcattt

SEQ ID NO: 354 - DNA, 21 bp, synthetic construct
  source 1..21: mol_type = other DNA
  modified_base 1: mod_base = OTHER; note = adenosine-3'-phosphate
  modified_base 2: mod_base = OTHER; note = uridine-3'-phosphate
  modified_base 3: mod_base = OTHER; note = guanosine-3'-phosphate
  modified_base 4: mod_base = OTHER; note = adenosine-3'-phosphate
  modified_base 5: mod_base = OTHER; note = cytidine-3'-phosphate
  modified_base 6: mod_base = OTHER; note = 2'-O-methylcytidine-3'-phosphate
  modified_base 7: mod_base = OTHER; note = 2'-O-methylcytidine-3'-phosphate
  modified_base 8: mod_base = OTHER; note = uridine-3'-phosphate
  modified_base 9: mod_base = OTHER; note = guanosine-3'-phosphate
  modified_base 10: mod_base = OTHER; note = 2'-O-methylcytidine-3'-phosphate
  modified_base 11: mod_base = OTHER; note = 2'-O-methylcytidine-3'-phosphate
  modified_base 12: mod_base = OTHER; note = cytidine-3'-phosphate
  modified_base 13: mod_base = OTHER; note = uridine-3'-phosphate
  modified_base 14: mod_base = OTHER; note = cytidine-3'-phosphate
  modified_base 15: mod_base = OTHER; note = guanosine-3'-phosphate
  modified_base 16: mod_base = OTHER; note = adenosine-3'-phosphate
  modified_base 17: mod_base = OTHER; note = 2'-O-methyluridine-3'-phosphate
  modified_base 18: mod_base = OTHER; note = 2'-O-methyluridine-3'-phosphate
  modified_base 19: mod_base = OTHER; note = 2'-O-methyluridine-3'-phosphate
  modified_base 20: mod_base = OTHER; note = 2'-deoxythymidine-3'-phosphorothioate
  misc_feature 1..19: note = RNA
  misc_feature 20..21: note = DNA
atgaccctgccctcgattttt

SEQ ID NO: 355 - DNA, 21 bp, synthetic construct
  source 1..21: mol_type = other DNA
  modified_base 1: mod_base = OTHER; note = adenosine-3'-phosphate
  modified_base 2: mod_base = OTHER; note = adenosine-3'-phosphate
  modified_base 3: mod_base = OTHER; note = adenosine-3'-phosphate
  modified_base 4: mod_base = OTHER; note = 2'-deoxy-2'-fluorouridine-3'-phosphate
  modified_base 5: mod_base = OTHER; note = 2'-deoxy-2'-fluorocytidine-3'-phosphate
  modified_base 6: mod_base = OTHER; note = guanosine-3'-phosphate
  modified_base 7: mod_base = OTHER; note = adenosine-3'-phosphate
  modified_base 8: mod_base = OTHER; note = guanosine-3'-phosphate
  modified_base 9: mod_base = OTHER; note = guanosine-3'-phosphate
  modified_base 10: mod_base = OTHER; note = guanosine-3'-phosphate
  modified_base 11: mod_base = OTHER; note = 2'-deoxy-2'-fluorocytidine-3'-phosphate
  modified_base 12: mod_base = OTHER; note = adenosine-3'-phosphate
  modified_base 13: mod_base = OTHER; note = guanosine-3'-phosphate
  modified_base 14: mod_base = OTHER; note = guanosine-3'-phosphate
  modified_base 15: mod_base = OTHER; note = guanosine-3'-phosphate
  modified_base 16: mod_base = OTHER; note = 2'-deoxy-2'-fluorouridine-3'-phosphate
  modified_base 17: mod_base = OTHER; note = 2'-deoxy-2'-fluorocytidine-3'-phosphate
  modified_base 18: mod_base = OTHER; note = adenosine-3'-phosphate
  modified_base 19: mod_base = OTHER; note = 2'-deoxy-2'-fluorouridine-3'-phosphate
  modified_base 20: mod_base = OTHER; note = 2'-deoxythymidine-3'-phosphorothioate
  misc_feature 1..19: note = RNA
  misc_feature 20..21: note = DNA
aaatcgagggcagggtcattt

SEQ ID NO: 356 - DNA, 21 bp, synthetic construct
  source 1..21: mol_type = other DNA
  modified_base 1: mod_base = OTHER; note = adenosine-3'-phosphate
  modified_base 2: mod_base = OTHER; note = uridine-3'-phosphate
  modified_base 3: mod_base = OTHER; note = guanosine-3'-phosphate
  modified_base 4: mod_base = OTHER; note = adenosine-3'-phosphate
  modified_base 5: mod_base = OTHER; note = cytidine-3'-phosphate
  modified_base 6: mod_base = OTHER; note = 2'-O-methylcytidine-3'-phosphate
  modified_base 7: mod_base = OTHER; note = 2'-O-methylcytidine-3'-phosphate
  modified_base 8: mod_base = OTHER; note = uridine-3'-phosphate
  modified_base 9: mod_base = OTHER; note = guanosine-3'-phosphate
  modified_base 10: mod_base = OTHER; note = 2'-O-methylcytidine-3'-phosphate
  modified_base 11: mod_base = OTHER; note = 2'-O-methylcytidine-3'-phosphate
  modified_base 12: mod_base = OTHER; note = cytidine-3'-phosphate
  modified_base 13: mod_base = OTHER; note = uridine-3'-phosphate
  modified_base 14: mod_base = OTHER; note = cytidine-3'-phosphate
  modified_base 15: mod_base = OTHER; note = guanosine-3'-phosphate
  modified_base 16: mod_base = OTHER; note = adenosine-3'-phosphate
  modified_base 17: mod_base = OTHER; note = 2'-O-methyluridine-3'-phosphate
  modified_base 18: mod_base = OTHER; note = 2'-O-methyluridine-3'-phosphate
  modified_base 19: mod_base = OTHER; note = 2'-O-methyluridine-3'-phosphate
  modified_base 20: mod_base = OTHER; note = 2'-deoxythymidine-3'-phosphorothioate
  misc_feature 1..19: note = RNA
  misc_feature 20..21: note = DNA
atgaccctgccctcgattttt

SEQ ID NO: 357 - DNA, 21 bp, synthetic construct
  source 1..21: mol_type = other DNA
  modified_base 1: mod_base = OTHER; note = adenosine-3'-phosphate
  modified_base 2: mod_base = OTHER; note = 2'-O-methyladenosine-3'-phosphate
  modified_base 3: mod_base = OTHER; note = adenosine-3'-phosphate
  modified_base 4: mod_base = OTHER; note = 2'-O-methyluridine-3'-phosphate
  modified_base 5: mod_base = OTHER; note = cytidine-3'-phosphate
  modified_base 6: mod_base = OTHER; note = 2'-O-methylguanosine-3'-phosphate
  modified_base 7: mod_base = OTHER; note = adenosine-3'-phosphate
  modified_base 8: mod_base = OTHER; note = 2'-O-methylguanosine-3'-phosphate
  modified_base 9: mod_base = OTHER; note = guanosine-3'-phosphate
  modified_base 10: mod_base = OTHER; note = 2'-O-methylguanosine-3'-phosphate
  modified_base 11: mod_base = OTHER; note = cytidine-3'-phosphate
  modified_base 12: mod_base = OTHER; note = 2'-O-methyladenosine-3'-phosphate
  modified_base 13: mod_base = OTHER; note = guanosine-3'-phosphate
  modified_base 14: mod_base = OTHER; note = 2'-O-methylguanosine-3'-phosphate
  modified_base 15: mod_base = OTHER; note = guanosine-3'-phosphate
  modified_base 16: mod_base = OTHER; note = 2'-O-methyluridine-3'-phosphate
  modified_base 17: mod_base = OTHER; note = cytidine-3'-phosphate
  modified_base 18: mod_base = OTHER; note = 2'-O-methyladenosine-3'-phosphate
  modified_base 19: mod_base = OTHER; note = uridine-3'-phosphate
  modified_base 20: mod_base = OTHER; note = 2'-deoxythymidine-3'-phosphorothioate
  misc_feature 1..19: note = RNA
  misc_feature 20..21: note = DNA
aaatcgagggcagggtcattt

SEQ ID NO: 358 - DNA, 21 bp, synthetic construct
  source 1..21: mol_type = other DNA
  modified_base 1: mod_base = OTHER; note = adenosine-3'-phosphate
  modified_base 2: mod_base = OTHER; note = uridine-3'-phosphate
  modified_base 3: mod_base = OTHER; note = guanosine-3'-phosphate
  modified_base 4: mod_base = OTHER; note = adenosine-3'-phosphate
  modified_base 5: mod_base = OTHER; note = cytidine-3'-phosphate
  modified_base 6: mod_base = OTHER; note = 2'-O-methylcytidine-3'-phosphate
  modified_base 7: mod_base = OTHER; note = 2'-O-methylcytidine-3'-phosphate
  modified_base 8: mod_base = OTHER; note = uridine-3'-phosphate
  modified_base 9: mod_base = OTHER; note = guanosine-3'-phosphate
  modified_base 10: mod_base = OTHER; note = 2'-O-methylcytidine-3'-phosphate
  modified_base 11: mod_base = OTHER; note = 2'-O-methylcytidine-3'-phosphate
  modified_base 12: mod_base = OTHER; note = cytidine-3'-phosphate
  modified_base 13: mod_base = OTHER; note = uridine-3'-phosphate
  modified_base 14: mod_base = OTHER; note = cytidine-3'-phosphate
  modified_base 15: mod_base = OTHER; note = guanosine-3'-phosphate
  modified_base 16: mod_base = OTHER; note = adenosine-3'-phosphate
  modified_base 17: mod_base = OTHER; note = 2'-O-methyluridine-3'-phosphate
  modified_base 18: mod_base = OTHER; note = 2'-O-methyluridine-3'-phosphate
  modified_base 19: mod_base = OTHER; note = 2'-O-methyluridine-3'-phosphate
  modified_base 20: mod_base = OTHER; note = 2'-deoxythymidine-3'-phosphorothioate
  misc_feature 1..19: note = RNA
  misc_feature 20..21: note = DNA
atgaccctgccctcgattttt

SEQ ID NO: 359 - DNA, 21 bp, synthetic construct
  source 1..21: mol_type = other DNA
  modified_base 1: mod_base = OTHER; note = 2'-deoxy-2'-fluorocytidine-3'-phosphate
  modified_base 2: mod_base = OTHER; note = 2'-O-methylguanosine-3'-phosphate
  modified_base 3: mod_base = OTHER; note = 2'-deoxy-2'-fluoroguanosine-3'-phosphate
  modified_base 4: mod_base = OTHER; note = 2'-O-methylcytidine-3'-phosphate
  modified_base 5: mod_base = OTHER; note = 2'-deoxy-2'-fluoroadenosine-3'-phosphate
  modified_base 6: mod_base = OTHER; note = 2'-O-methylcytidine-3'-phosphate
  modified_base 7: mod_base = OTHER; note = 2'-deoxy-2'-fluorocytidine-3'-phosphate
  modified_base 8: mod_base = OTHER; note = 2'-O-methylcytidine-3'-phosphate
  modified_base 9: mod_base = OTHER; note = 2'-deoxy-2'-fluorouridine-3'-phosphate
  modified_base 10: mod_base = OTHER; note = 2'-O-methylcytidine-3'-phosphate
  modified_base 11: mod_base = OTHER; note = 2'-deoxy-2'-fluoroadenosine-3'-phosphate
  modified_base 12: mod_base = OTHER; note = 2'-O-methyluridine-3'-phosphate
  modified_base 13: mod_base = OTHER; note = 2'-deoxy-2'-fluoroadenosine-3'-phosphate
  modified_base 14: mod_base = OTHER; note = 2'-O-methylguanosine-3'-phosphate
  modified_base 15: mod_base = OTHER; note = 2'-deoxy-2'-fluoroguanosine-3'-phosphate
  modified_base 16: mod_base = OTHER; note = 2'-O-methylcytidine-3'-phosphate
  modified_base 17: mod_base = OTHER; note = 2'-deoxy-2'-fluorocytidine-3'-phosphate
  modified_base 18: mod_base = OTHER; note = 2'-O-methyluridine-3'-phosphate
  modified_base 19: mod_base = OTHER; note = 2'-deoxy-2'-fluoroguanosine-3'-phosphate
  modified_base 20: mod_base = OTHER; note = 2'-deoxythymidine-3'-phosphorothioate
  misc_feature 1..19: note = RNA
  misc_feature 20..21: note = DNA
cggcaccctcataggcctgtt

SEQ ID NO: 360 - DNA, 21 bp, synthetic construct
  source 1..21: mol_type = other DNA
  modified_base 1: mod_base = OTHER; note = 2'-O-methylcytidine-3'-phosphate 5'phosphate
  modified_base 2: mod_base = OTHER; note = 2'-deoxy-2'-fluoroadenosine-3'-phosphate
  modified_base 3: mod_base = OTHER; note = 2'-O-methylguanosine-3'-phosphate
  modified_base 4: mod_base = OTHER; note = 2'-deoxy-2'-fluoroguanosine-3'-phosphate
  modified_base 5: mod_base = OTHER; note = 2'-O-methylcytidine-3'-phosphate
  modified_base 6: mod_base = OTHER; note = 2'-deoxy-2'-fluorocytidine-3'-phosphate
  modified_base 7: mod_base = OTHER; note = 2'-O-methyluridine-3'-phosphate
  modified_base 8: mod_base = OTHER; note = 2'-deoxy-2'-fluoroadenosine-3'-phosphate
  modified_base 9: mod_base = OTHER; note = 2'-O-methyluridine-3'-phosphate
  modified_base 10: mod_base = OTHER; note = 2'-deoxy-2'-fluoroguanosine-3'-phosphate
  modified_base 11: mod_base = OTHER; note = 2'-O-methyladenosine-3'-phosphate
  modified_base 12: mod_base = OTHER; note = 2'-deoxy-2'-fluoroguanosine-3'-phosphate
  modified_base 13: mod_base = OTHER; note = 2'-O-methylguanosine-3'-phosphate
  modified_base 14: mod_base = OTHER; note = 2'-deoxy-2'-fluoroguanosine-3'-phosphate
  modified_base 15: mod_base = OTHER; note = 2'-O-methyluridine-3'-phosphate
  modified_base 16: mod_base = OTHER; note = 2'-deoxy-2'-fluoroguanosine-3'-phosphate
  modified_base 17: mod_base = OTHER; note = 2'-O-methylcytidine-3'-phosphate
  modified_base 18: mod_base = OTHER; note = 2'-deoxy-2'-fluorocytidine-3'-phosphate
  modified_base 19: mod_base = OTHER; note = 2'-O-methylguanosine-3'-phosphate
  modified_base 20: mod_base = OTHER; note = 2'-deoxythymidine-3'-phosphorothioate
  misc_feature 1..19: note = RNA
  misc_feature 20..21: note = DNA
caggcctatgagggtgccgtt

SEQ ID NO: 361 - DNA, 21 bp, synthetic construct
  source 1..21: mol_type = other DNA
  modified_base 1: mod_base = OTHER; note = 2'-deoxy-2'-fluorocytidine-3'-phosphate
  modified_base 2: mod_base = OTHER; note = guanosine-3'-phosphate
  modified_base 3: mod_base = OTHER; note = guanosine-3'-phosphate
  modified_base 4: mod_base = OTHER; note = 2'-deoxy-2'-fluorocytidine-3'-phosphate
  modified_base 5: mod_base = OTHER; note = adenosine-3'-phosphate
  modified_base 6: mod_base = OTHER; note = 2'-deoxy-2'-fluorocytidine-3'-phosphate
  modified_base 7: mod_base = OTHER; note = 2'-deoxy-2'-fluorocytidine-3'-phosphate
  modified_base 8: mod_base = OTHER; note = 2'-deoxy-2'-fluorocytidine-3'-phosphate
  modified_base 9: mod_base = OTHER; note = 2'-deoxy-2'-fluorouridine-3'-phosphate
  modified_base 10: mod_base = OTHER; note = 2'-deoxy-2'-fluorocytidine-3'-phosphate
  modified_base 11: mod_base = OTHER; note = adenosine-3'-phosphate
  modified_base 12: mod_base = OTHER; note = 2'-deoxy-2'-fluorouridine-3'-phosphate
  modified_base 13: mod_base = OTHER; note = adenosine-3'-phosphate
  modified_base 14: mod_base = OTHER; note = guanosine-3'-phosphate
  modified_base 15: mod_base = OTHER; note = guanosine-3'-phosphate
  modified_base 16: mod_base = OTHER; note = 2'-deoxy-2'-fluorocytidine-3'-phosphate
  modified_base 17: mod_base = OTHER; note = 2'-deoxy-2'-fluorocytidine-3'-phosphate
  modified_base 18: mod_base = OTHER; note = 2'-deoxy-2'-fluorouridine-3'-phosphate
  modified_base 19: mod_base = OTHER; note = guanosine-3'-phosphate
  modified_base 20: mod_base = OTHER; note = 2'-deoxythymidine-3'-phosphorothioate
  misc_feature 1..19: note = RNA
  misc_feature 20..21: note = DNA
cggcaccctcataggcctgtt

SEQ ID NO: 362 - DNA, 21 bp, synthetic construct
  source 1..21: mol_type = other DNA
  modified_base 1: mod_base = OTHER; note = 2'-deoxy-2'-fluorocytidine-3'-phosphate
  modified_base 2: mod_base = OTHER; note = adenosine-3'-phosphate
  modified_base 3: mod_base = OTHER; note = guanosine-3'-phosphate
  modified_base 4: mod_base = OTHER; note = guanosine-3'-phosphate
  modified_base 5: mod_base = OTHER; note = 2'-deoxy-2'-fluorocytidine-3'-phosphate
  modified_base 6: mod_base = OTHER; note = 2'-deoxy-2'-fluorocytidine-3'-phosphate
  modified_base 7: mod_base = OTHER; note = 2'-deoxy-2'-fluorouridine-3'-phosphate
  modified_base 8: mod_base = OTHER; note = adenosine-3'-phosphate
  modified_base 9: mod_base = OTHER; note = 2'-deoxy-2'-fluorouridine-3'-phosphate
  modified_base 10: mod_base = OTHER; note = guanosine-3'-phosphate
  modified_base 11: mod_base = OTHER; note = adenosine-3'-phosphate
  modified_base 12: mod_base = OTHER; note = guanosine-3'-phosphate
  modified_base 13: mod_base = OTHER; note = guanosine-3'-phosphate
  modified_base 14: mod_base = OTHER; note = guanosine-3'-phosphate
  modified_base 15: mod_base = OTHER; note = 2'-deoxy-2'-fluorouridine-3'-phosphate
  modified_base 16: mod_base = OTHER; note = guanosine-3'-phosphate
  modified_base 17: mod_base = OTHER; note = 2'-deoxy-2'-fluorocytidine-3'-phosphate
  modified_base 18: mod_base = OTHER; note = 2'-deoxy-2'-fluorocytidine-3'-phosphate
  modified_base 19: mod_base = OTHER; note = guanosine-3'-phosphate
  modified_base 20: mod_base = OTHER; note = 2'-deoxythymidine-3'-phosphorothioate
  misc_feature 1..19: note = RNA
  misc_feature 20..21: note = DNA
caggcctatgagggtgccgtt

SEQ ID NO: 363 - DNA, 21 bp, synthetic construct
  source 1..21: mol_type = other DNA
  modified_base 1: mod_base = OTHER; note = cytidine-3'-phosphate
  modified_base 2: mod_base = OTHER; note = 2'-O-methylguanosine-3'-phosphate
  modified_base 3: mod_base = OTHER; note = guanosine-3'-phosphate
  modified_base 4: mod_base = OTHER; note = 2'-O-methylcytidine-3'-phosphate
  modified_base 5: mod_base = OTHER; note = adenosine-3'-phosphate
  modified_base 6: mod_base = OTHER; note = 2'-O-methylcytidine-3'-phosphate
  modified_base 7: mod_base = OTHER; note = cytidine-3'-phosphate
  modified_base 8: mod_base = OTHER; note = 2'-O-methylcytidine-3'-phosphate
  modified_base 9: mod_base = OTHER; note = uridine-3'-phosphate
  modified_base 10: mod_base = OTHER; note = 2'-O-methylcytidine-3'-phosphate
  modified_base 11: mod_base = OTHER; note = adenosine-3'-phosphate
  modified_base 12: mod_base = OTHER; note = 2'-O-methyluridine-3'-phosphate
  modified_base 13: mod_base = OTHER; note = adenosine-3'-phosphate
  modified_base 14: mod_base = OTHER; note = 2'-O-methylguanosine-3'-phosphate
  modified_base 15: mod_base = OTHER; note = guanosine-3'-phosphate
  modified_base 16: mod_base = OTHER; note = 2'-O-methylcytidine-3'-phosphate
  modified_base 17: mod_base = OTHER; note = cytidine-3'-phosphate
  modified_base 18: mod_base = OTHER; note = 2'-O-methyluridine-3'-phosphate
  modified_base 19: mod_base = OTHER; note = guanosine-3'-phosphate
  modified_base 20: mod_base = OTHER; note = 2'-deoxythymidine-3'-phosphorothioate
  misc_feature 1..19: note = RNA
  misc_feature 20..21: note = DNA
cggcaccctcataggcctgtt

SEQ ID NO: 364 - DNA, 21 bp, synthetic construct
  source 1..21: mol_type = other DNA
  modified_base 1: mod_base = OTHER; note = 2'-O-methylcytidine-3'-phosphate 5'phosphate
  modified_base 2: mod_base = OTHER; note = 2'-deoxy-2'-fluoroadenosine-3'-phosphate
  modified_base 3: mod_base = OTHER; note = 2'-O-methylguanosine-3'-phosphate
  modified_base 4: mod_base = OTHER; note = 2'-deoxy-2'-fluoroguanosine-3'-phosphate
  modified_base 5: mod_base = OTHER; note = 2'-O-methylcytidine-3'-phosphate
  modified_base 6: mod_base = OTHER; note = 2'-deoxy-2'-fluorocytidine-3'-phosphate
  modified_base 7: mod_base = OTHER; note = 2'-O-methyluridine-3'-phosphate
  modified_base 8: mod_base = OTHER; note = 2'-deoxy-2'-fluoroadenosine-3'-phosphate
  modified_base 9: mod_base = OTHER; note = 2'-O-methyluridine-3'-phosphate
  modified_base 10: mod_base = OTHER; note = 2'-deoxy-2'-fluoroguanosine-3'-phosphate
  modified_base 11: mod_base = OTHER; note = 2'-O-methyladenosine-3'-phosphate
  modified_base 12: mod_base = OTHER; note = 2'-deoxy-2'-fluoroguanosine-3'-phosphate
  modified_base 13: mod_base = OTHER; note = 2'-O-methylguanosine-3'-phosphate
  modified_base 14: mod_base = OTHER; note = 2'-deoxy-2'-fluoroguanosine-3'-phosphate
  modified_base 15: mod_base = OTHER; note = 2'-O-methyluridine-3'-phosphate
  modified_base 16: mod_base = OTHER; note = 2'-deoxy-2'-fluoroguanosine-3'-phosphate
  modified_base 17: mod_base = OTHER; note = 2'-O-methylcytidine-3'-phosphate
  modified_base 18: mod_base = OTHER; note = 2'-deoxy-2'-fluorocytidine-3'-phosphate
  modified_base 19: mod_base = OTHER; note = 2'-O-methylguanosine-3'-phosphate
  modified_base 20: mod_base = OTHER; note = 2'-deoxythymidine-3'-phosphorothioate
  misc_feature 1..19: note = RNA
  misc_feature 20..21: note = DNA
caggcctatgagggtgccgtt

SEQ ID NO: 365 - DNA, 21 bp, synthetic construct
  source 1..21: mol_type = other DNA
  modified_base 1: mod_base = OTHER; note = cytidine-3'-phosphate
  modified_base 2: mod_base = OTHER; note = 2'-O-methylguanosine-3'-phosphate
  modified_base 3: mod_base = OTHER; note = guanosine-3'-phosphate
  modified_base 4: mod_base = OTHER; note = 2'-O-methylcytidine-3'-phosphate
  modified_base 5: mod_base = OTHER; note = adenosine-3'-phosphate
  modified_base 6: mod_base = OTHER; note = 2'-O-methylcytidine-3'-phosphate
  modified_base 7: mod_base = OTHER; note = cytidine-3'-phosphate
  modified_base 8: mod_base = OTHER; note = 2'-O-methylcytidine-3'-phosphate
  modified_base 9: mod_base = OTHER; note = uridine-3'-phosphate
  modified_base 10: mod_base = OTHER; note = 2'-O-methylcytidine-3'-phosphate
  modified_base 11: mod_base = OTHER; note = adenosine-3'-phosphate
  modified_base 12: mod_base = OTHER; note = 2'-O-methyluridine-3'-phosphate
  modified_base 13: mod_base = OTHER; note = adenosine-3'-phosphate
  modified_base 14: mod_base = OTHER; note = 2'-O-methylguanosine-3'-phosphate
  modified_base 15: mod_base = OTHER; note = guanosine-3'-phosphate
  modified_base 16: mod_base = OTHER; note = 2'-O-methylcytidine-3'-phosphate
  modified_base 17: mod_base = OTHER; note = cytidine-3'-phosphate
  modified_base 18: mod_base = OTHER; note = 2'-O-methyluridine-3'-phosphate
  modified_base 19: mod_base = OTHER; note = guanosine-3'-phosphate
  modified_base 20: mod_base = OTHER; note = 2'-deoxythymidine-3'-phosphorothioate
  misc_feature 1..19: note = RNA
  misc_feature 20..21: note = DNA
cggcaccctcataggcctgtt

SEQ ID NO: 366 - DNA, 21 bp, synthetic construct
  source 1..21: mol_type = other DNA
  modified_base 1: mod_base = OTHER; note = 2'-deoxy-2'-fluorocytidine-3'-phosphate
  modified_base 2: mod_base = OTHER; note = adenosine-3'-phosphate
  modified_base 3: mod_base = OTHER; note = guanosine-3'-phosphate
  modified_base 4: mod_base = OTHER; note = guanosine-3'-phosphate
  modified_base 5: mod_base = OTHER; note = 2'-deoxy-2'-fluorocytidine-3'-phosphate
  modified_base 6: mod_base = OTHER; note = 2'-deoxy-2'-fluorocytidine-3'-phosphate
  modified_base 7: mod_base = OTHER; note = 2'-deoxy-2'-fluorouridine-3'-phosphate
  modified_base 8: mod_base = OTHER; note = adenosine-3'-phosphate
  modified_base 9: mod_base = OTHER; note = 2'-deoxy-2'-fluorouridine-3'-phosphate
  modified_base 10: mod_base = OTHER; note = guanosine-3'-phosphate
  modified_base 11: mod_base = OTHER; note = adenosine-3'-phosphate
  modified_base 12: mod_base = OTHER; note = guanosine-3'-phosphate
  modified_base 13: mod_base = OTHER; note = guanosine-3'-phosphate
  modified_base 14: mod_base = OTHER; note = guanosine-3'-phosphate
  modified_base 15: mod_base = OTHER; note = 2'-deoxy-2'-fluorouridine-3'-phosphate
  modified_base 16: mod_base = OTHER; note = guanosine-3'-phosphate
  modified_base 17: mod_base = OTHER; note = 2'-deoxy-2'-fluorocytidine-3'-phosphate
  modified_base 18: mod_base = OTHER; note = 2'-deoxy-2'-fluorocytidine-3'-phosphate
  modified_base 19: mod_base = OTHER; note = guanosine-3'-phosphate
  modified_base 20: mod_base = OTHER; note = 2'-deoxythymidine-3'-phosphorothioate
  misc_feature 1..19: note = RNA
  misc_feature 20..21: note = DNA
caggcctatgagggtgccgtt

SEQ ID NO: 367 - DNA, 21 bp, synthetic construct
  source 1..21: mol_type = other DNA
  modified_base 1: mod_base = OTHER; note = 2'-deoxy-2'-fluorocytidine-3'-phosphate
  modified_base 2: mod_base = OTHER; note = 2'-O-methylguanosine-3'-phosphate
  modified_base 3: mod_base = OTHER; note = 2'-deoxy-2'-fluoroguanosine-3'-phosphate
  modified_base 4: mod_base = OTHER; note = 2'-O-methylcytidine-3'-phosphate
  modified_base 5: mod_base = OTHER; note = 2'-deoxy-2'-fluoroadenosine-3'-phosphate
  modified_base 6: mod_base = OTHER; note = 2'-O-methylcytidine-3'-phosphate
  modified_base 7: mod_base = OTHER; note = 2'-deoxy-2'-fluorocytidine-3'-phosphate
  modified_base 8: mod_base = OTHER; note = 2'-O-methylcytidine-3'-phosphate
  modified_base 9: mod_base = OTHER; note = 2'-deoxy-2'-fluorouridine-3'-phosphate
  modified_base 10: mod_base = OTHER; note = 2'-O-methylcytidine-3'-phosphate
  modified_base 11: mod_base = OTHER; note = 2'-deoxy-2'-fluoroadenosine-3'-phosphate
  modified_base 12: mod_base = OTHER; note = 2'-O-methyluridine-3'-phosphate
  modified_base 13: mod_base = OTHER; note = 2'-deoxy-2'-fluoroadenosine-3'-phosphate
  modified_base 14: mod_base = OTHER; note = 2'-O-methylguanosine-3'-phosphate
  modified_base 15: mod_base = OTHER; note = 2'-deoxy-2'-fluoroguanosine-3'-phosphate
  modified_base 16: mod_base = OTHER; note = 2'-O-methylcytidine-3'-phosphate
  modified_base 17: mod_base = OTHER; note = 2'-deoxy-2'-fluorocytidine-3'-phosphate
  modified_base 18: mod_base = OTHER; note = 2'-O-methyluridine-3'-phosphate
  modified_base 19: mod_base = OTHER; note = 2'-deoxy-2'-fluoroguanosine-3'-phosphate
  modified_base 20: mod_base = OTHER; note = 2'-deoxythymidine-3'-phosphorothioate
  misc_feature 1..19: note = RNA
  misc_feature 20..21: note = DNA
cggcaccctcataggcctgtt

SEQ ID NO: 368 - DNA, 21 bp, synthetic construct
  source 1..21: mol_type = other DNA
  modified_base 1: mod_base = OTHER; note = cytidine-3'-phosphate
  modified_base 2: mod_base = OTHER; note = adenosine-3'-phosphate
  modified_base 3: mod_base = OTHER; note = guanosine-3'-phosphate
  modified_base 4: mod_base = OTHER; note = guanosine-3'-phosphate
  modified_base 5: mod_base = OTHER; note = cytidine-3'-phosphate
  modified_base 6: mod_base = OTHER; note = 2'-O-methylcytidine-3'-phosphate
  modified_base 7: mod_base = OTHER; note = 2'-O-methyluridine-3'-phosphate
  modified_base 8: mod_base = OTHER; note = adenosine-3'-phosphate
  modified_base 9: mod_base = OTHER; note = uridine-3'-phosphate
  modified_base 10: mod_base = OTHER; note = 2'-O-methylguanosine-3'-phosphate
  modified_base 11: mod_base = OTHER; note = 2'-O-methyladenosine-3'-phosphate
  modified_base 12: mod_base = OTHER; note = guanosine-3'-phosphate
  modified_base 13: mod_base = OTHER; note = guanosine-3'-phosphate
  modified_base 14: mod_base = OTHER; note = guanosine-3'-phosphate
  modified_base 15: mod_base = OTHER; note = uridine-3'-phosphate
  modified_base 16: mod_base = OTHER; note = guanosine-3'-phosphate
  modified_base 17: mod_base = OTHER; note = 2'-O-methylcytidine-3'-phosphate
  modified_base 18: mod_base = OTHER; note = 2'-O-methylcytidine-3'-phosphate
  modified_base 19: mod_base = OTHER; note = 2'-O-methylguanosine-3'-phosphate
  modified_base 20: mod_base = OTHER; note = 2'-deoxythymidine-3'-phosphorothioate
  misc_feature 1..19: note = RNA
  misc_feature 20..21: note = DNA
caggcctatgagggtgccgtt

SEQ ID NO: 369 - DNA, 21 bp, synthetic construct
  source 1..21: mol_type = other DNA
  modified_base 1: mod_base = OTHER; note = 2'-deoxy-2'-fluorocytidine-3'-phosphate
  modified_base 2: mod_base = OTHER; note = guanosine-3'-phosphate
  modified_base 3: mod_base = OTHER; note = guanosine-3'-phosphate
  modified_base 4: mod_base = OTHER; note = 2'-deoxy-2'-fluorocytidine-3'-phosphate
  modified_base 5: mod_base = OTHER; note = adenosine-3'-phosphate
  modified_base 6: mod_base = OTHER; note = 2'-deoxy-2'-fluorocytidine-3'-phosphate
  modified_base 7: mod_base = OTHER; note = 2'-deoxy-2'-fluorocytidine-3'-phosphate
  modified_base 8: mod_base = OTHER; note = 2'-deoxy-2'-fluorocytidine-3'-phosphate
  modified_base 9: mod_base = OTHER; note = 2'-deoxy-2'-fluorouridine-3'-phosphate
  modified_base 10: mod_base = OTHER; note = 2'-deoxy-2'-fluorocytidine-3'-phosphate
  modified_base 11: mod_base = OTHER; note = adenosine-3'-phosphate
  modified_base 12: mod_base = OTHER; note = 2'-deoxy-2'-fluorouridine-3'-phosphate
  modified_base 13: mod_base = OTHER; note = adenosine-3'-phosphate
  modified_base 14: mod_base = OTHER; note = guanosine-3'-phosphate
  modified_base 15: mod_base = OTHER; note = guanosine-3'-phosphate
  modified_base 16: mod_base = OTHER; note = 2'-deoxy-2'-fluorocytidine-3'-phosphate
  modified_base 17: mod_base = OTHER; note = 2'-deoxy-2'-fluorocytidine-3'-phosphate
  modified_base 18: mod_base = OTHER; note = 2'-deoxy-2'-fluorouridine-3'-phosphate
  modified_base 19: mod_base = OTHER; note = guanosine-3'-phosphate
  modified_base 20: mod_base = OTHER; note = 2'-deoxythymidine-3'-phosphorothioate
  misc_feature 1..19: note = RNA
  misc_feature 20..21: note = DNA
cggcaccctcataggcctgtt

SEQ ID NO: 370 - DNA, 21 bp, synthetic construct
  source 1..21: mol_type = other DNA
  modified_base 1: mod_base = OTHER; note = cytidine-3'-phosphate
  modified_base 2: mod_base = OTHER; note = adenosine-3'-phosphate
  modified_base 3: mod_base = OTHER; note = guanosine-3'-phosphate
  modified_base 4: mod_base = OTHER; note = guanosine-3'-phosphate
  modified_base 5: mod_base = OTHER; note = cytidine-3'-phosphate
  modified_base 6: mod_base = OTHER; note = 2'-O-methylcytidine-3'-phosphate
  modified_base 7: mod_base = OTHER; note = 2'-O-methyluridine-3'-phosphate
  modified_base 8: mod_base = OTHER; note = adenosine-3'-phosphate
  modified_base 9: mod_base = OTHER; note = uridine-3'-phosphate
  modified_base 10: mod_base = OTHER; note = 2'-O-methylguanosine-3'-phosphate
  modified_base 11: mod_base = OTHER; note = 2'-O-methyladenosine-3'-phosphate
  modified_base 12: mod_base = OTHER; note = guanosine-3'-phosphate
  modified_base 13: mod_base = OTHER; note = guanosine-3'-phosphate
  modified_base 14: mod_base = OTHER; note = guanosine-3'-phosphate
  modified_base 15: mod_base = OTHER; note = uridine-3'-phosphate
  modified_base 16: mod_base = OTHER; note = guanosine-3'-phosphate
  modified_base 17: mod_base = OTHER; note = 2'-O-methylcytidine-3'-phosphate
  modified_base 18: mod_base = OTHER; note = 2'-O-methylcytidine-3'-phosphate
  modified_base 19: mod_base = OTHER; note = 2'-O-methylguanosine-3'-phosphate
  modified_base 20: mod_base = OTHER; note = 2'-deoxythymidine-3'-phosphorothioate
  misc_feature 1..19: note = RNA
  misc_feature 20..21: note = DNA
caggcctatgagggtgccgtt

SEQ ID NO: 371 - DNA, 21 bp, synthetic construct
  source 1..21: mol_type = other DNA
  modified_base 1: mod_base = OTHER; note = cytidine-3'-phosphate
  modified_base 2: mod_base = OTHER; note = 2'-O-methylguanosine-3'-phosphate
  modified_base 3: mod_base = OTHER; note = guanosine-3'-phosphate
  modified_base 4: mod_base = OTHER; note = 2'-O-methylcytidine-3'-phosphate
  modified_base 5: mod_base = OTHER; note = adenosine-3'-phosphate
  modified_base 6: mod_base = OTHER; note = 2'-O-methylcytidine-3'-phosphate
  modified_base 7: mod_base = OTHER; note = cytidine-3'-phosphate
  modified_base 8: mod_base = OTHER; note = 2'-O-methylcytidine-3'-phosphate
  modified_base 9: mod_base = OTHER; note = uridine-3'-phosphate
  modified_base 10: mod_base = OTHER; note = 2'-O-methylcytidine-3'-phosphate
  modified_base 11: mod_base = OTHER; note = adenosine-3'-phosphate
  modified_base 12: mod_base = OTHER; note = 2'-O-methyluridine-3'-phosphate
  modified_base 13: mod_base = OTHER; note = adenosine-3'-phosphate
  modified_base 14: mod_base = OTHER; note = 2'-O-methylguanosine-3'-phosphate
  modified_base 15: mod_base = OTHER; note = guanosine-3'-phosphate
  modified_base 16: mod_base = OTHER; note = 2'-O-methylcytidine-3'-phosphate
  modified_base 17: mod_base = OTHER; note = cytidine-3'-phosphate
  modified_base 18: mod_base = OTHER; note = 2'-O-methyluridine-3'-phosphate
  modified_base 19: mod_base = OTHER; note = guanosine-3'-phosphate
  modified_base 20: mod_base = OTHER; note = 2'-deoxythymidine-3'-phosphorothioate
  misc_feature 1..19: note = RNA
  misc_feature 20..21: note = DNA
cggcaccctcataggcctgtt

SEQ ID NO: 372 - DNA, 21 bp, synthetic construct
  source 1..21: mol_type = other DNA
  modified_base 1: mod_base = OTHER; note = cytidine-3'-phosphate
  modified_base 2: mod_base = OTHER; note = adenosine-3'-phosphate
  modified_base 3: mod_base = OTHER; note = guanosine-3'-phosphate
  modified_base 4: mod_base = OTHER; note = guanosine-3'-phosphate
  modified_base 5: mod_base = OTHER; note = cytidine-3'-phosphate
  modified_base 6: mod_base = OTHER; note = 2'-O-methylcytidine-3'-phosphate
  modified_base 7: mod_base = OTHER; note = 2'-O-methyluridine-3'-phosphate
  modified_base 8: mod_base = OTHER; note = adenosine-3'-phosphate
  modified_base 9: mod_base = OTHER; note = uridine-3'-phosphate
  modified_base 10: mod_base = OTHER; note = 2'-O-methylguanosine-3'-phosphate
  modified_base 11: mod_base = OTHER; note = 2'-O-methyladenosine-3'-phosphate
  modified_base 12: mod_base = OTHER; note = guanosine-3'-phosphate
  modified_base 13: mod_base = OTHER; note = guanosine-3'-phosphate
  modified_base 14: mod_base = OTHER; note = guanosine-3'-phosphate
  modified_base 15: mod_base = OTHER; note = uridine-3'-phosphate
  modified_base 16: mod_base = OTHER; note = guanosine-3'-phosphate
  modified_base 17: mod_base = OTHER; note = 2'-O-methylcytidine-3'-phosphate
  modified_base 18: mod_base = OTHER; note = 2'-O-methylcytidine-3'-phosphate
  modified_base 19: mod_base = OTHER; note = 2'-O-methylguanosine-3'-phosphate
  modified_base 20: mod_base = OTHER; note = 2'-deoxythymidine-3'-phosphorothioate
  misc_feature 1..19: note = RNA
  misc_feature 20..21: note = DNA
caggcctatgagggtgccgtt

SEQ ID NO: 373 - DNA, 21 bp, synthetic construct
  source 1..21: mol_type = other DNA
  modified_base 1: mod_base = OTHER; note = adenosine-3'-phosphate
  modified_base 2: mod_base = OTHER; note = uridine-3'-phosphate
  modified_base 3: mod_base = OTHER; note = cytidine-3'-phosphate
  modified_base 4: mod_base = OTHER; note = guanosine-3'-phosphate
  modified_base 5: mod_base = OTHER; note = adenosine-3'-phosphate
  modified_base 6: mod_base = OTHER; note = guanosine-3'-phosphate
  modified_base 7: mod_base = OTHER; note = guanosine-3'-phosphate
  modified_base 8: mod_base = OTHER; note = guanosine-3'-phosphate
  modified_base 9: mod_base = OTHER; note = cytidine-3'-phosphate
  modified_base 10: mod_base = OTHER; note = adenosine-3'-phosphate
  modified_base 11: mod_base = OTHER; note = guanosine-3'-phosphate
  modified_base 12: mod_base = OTHER; note = guanosine-3'-phosphate
  modified_base 13: mod_base = OTHER; note = guanosine-3'-phosphate
  modified_base 14: mod_base = OTHER; note = uridine-3'-phosphate
  modified_base 15: mod_base = OTHER; note = cytidine-3'-phosphate
  modified_base 16: mod_base = OTHER; note = adenosine-3'-phosphate
  modified_base 17: mod_base = OTHER; note = uridine-3'-phosphate
  modified_base 18: mod_base = OTHER; note = guanosine-3'-phosphate
  modified_base 19: mod_base = OTHER; note = guanosine-3'-phosphate
  modified_base 20: mod_base = OTHER; note = 2'-deoxythymidine-3'-phosphorothioate
  misc_feature 1..19: note = RNA
  misc_feature 20..21: note = DNA
atcgagggcagggtcatggtt

SEQ ID NO: 374 - DNA, 21 bp, synthetic construct
  source 1..21: mol_type = other DNA
  modified_base 1: mod_base = OTHER; note = cytidine-3'-phosphate
  modified_base 2: mod_base = OTHER; note = cytidine-3'-phosphate
  modified_base 3: mod_base = OTHER; note = adenosine-3'-phosphate
  modified_base 4: mod_base = OTHER; note = uridine-3'-phosphate
  modified_base 5: mod_base = OTHER; note = guanosine-3'-phosphate
  modified_base 6: mod_base = OTHER; note = adenosine-3'-phosphate
  modified_base 7: mod_base = OTHER; note = cytidine-3'-phosphate
  modified_base 8: mod_base = OTHER; note = cytidine-3'-phosphate
  modified_base 9: mod_base = OTHER; note = cytidine-3'-phosphate
  modified_base 10: mod_base = OTHER; note = uridine-3'-phosphate
  modified_base 11: mod_base = OTHER; note = guanosine-3'-phosphate
  modified_base 12: mod_base = OTHER; note = cytidine-3'-phosphate
  modified_base 13: mod_base = OTHER; note = cytidine-3'-phosphate
  modified_base 14: mod_base = OTHER; note = cytidine-3'-phosphate
  modified_base 15: mod_base = OTHER; note = uridine-3'-phosphate
  modified_base 16: mod_base = OTHER; note = cytidine-3'-phosphate
  modified_base 17: mod_base = OTHER; note = guanosine-3'-phosphate
  modified_base 18: mod_base = OTHER; note = adenosine-3'-phosphate
  modified_base 19: mod_base = OTHER; note = uridine-3'-phosphate
  modified_base 20: mod_base = OTHER; note = 2'-deoxythymidine-3'-phosphorothioate
  misc_feature 1..19: note = RNA
  misc_feature 20..21: note = DNA
ccatgaccctgccctcgattt

SEQ ID NO: 375 - DNA, 21 bp, synthetic construct
  source 1..21: mol_type = other DNA
  modified_base 1: mod_base = OTHER; note = adenosine-3'-phosphate
  modified_base 2: mod_base = OTHER; note = 2'-O-methyluridine-3'-phosphate
  modified_base 3: mod_base = OTHER; note = 2'-O-methylcytidine-3'-phosphate
  modified_base 4: mod_base = OTHER; note = guanosine-3'-phosphate
  modified_base 5: mod_base = OTHER; note = adenosine-3'-phosphate
  modified_base 6: mod_base = OTHER; note = guanosine-3'-phosphate
  modified_base 7: mod_base = OTHER; note = guanosine-3'-phosphate
  modified_base 8: mod_base = OTHER; note = guanosine-3'-phosphate
  modified_base 9: mod_base = OTHER; note = 2'-O-methylcytidine-3'-phosphate
  modified_base 10: mod_base = OTHER; note = adenosine-3'-phosphate
  modified_base 11: mod_base = OTHER; note = guanosine-3'-phosphate
  modified_base 12: mod_base = OTHER; note = guanosine-3'-phosphate
  modified_base 13: mod_base = OTHER; note = guanosine-3'-phosphate
  modified_base 14: mod_base = OTHER; note = 2'-O-methyluridine-3'-phosphate
  modified_base 15: mod_base = OTHER; note = 2'-O-methylcytidine-3'-phosphate
  modified_base 16: mod_base = OTHER; note = adenosine-3'-phosphate
  modified_base 17: mod_base = OTHER; note = 2'-O-methyluridine-3'-phosphate
  modified_base 18: mod_base = OTHER; note = guanosine-3'-phosphate
  modified_base 19: mod_base = OTHER; note = guanosine-3'-phosphate
  modified_base 20: mod_base = OTHER; note = 2'-deoxythymidine-3'-phosphorothioate
  misc_feature 1..19: note = RNA
  misc_feature 20..21: note = DNA
atcgagggcagggtcatggtt

SEQ ID NO: 376 - DNA, 21 bp, synthetic construct
  source 1..21: mol_type = other DNA
  modified_base 1: mod_base = OTHER; note = cytidine-3'-phosphate
  modified_base 2: mod_base = OTHER; note = 2'-O-methylcytidine-3'-phosphate
  modified_base 3: mod_base = OTHER; note = adenosine-3'-phosphate
  modified_base 4: mod_base = OTHER; note = uridine-3'-phosphate
  modified_base 5: mod_base = OTHER; note = guanosine-3'-phosphate
  modified_base 6: mod_base = OTHER; note = adenosine-3'-phosphate
  modified_base 7: mod_base = OTHER; note = cytidine-3'-phosphate
  modified_base 8: mod_base = OTHER; note = cytidine-3'-phosphate
  modified_base 9: mod_base = OTHER; note = cytidine-3'-phosphate
  modified_base 10: mod_base = OTHER; note = uridine-3'-phosphate
  modified_base 11: mod_base = OTHER; note = guanosine-3'-phosphate
  modified_base 12: mod_base = OTHER; note = cytidine-3'-phosphate
  modified_base 13: mod_base = OTHER; note = cytidine-3'-phosphate
  modified_base 14: mod_base = OTHER; note = cytidine-3'-phosphate
  modified_base 15: mod_base = OTHER; note = uridine-3'-phosphate
  modified_base 16: mod_base = OTHER; note = cytidine-3'-phosphate
  modified_base 17: mod_base = OTHER; note = guanosine-3'-phosphate
  modified_base 18: mod_base = OTHER; note = adenosine-3'-phosphate
  modified_base 19: mod_base = OTHER; note = uridine-3'-phosphate
  modified_base 20: mod_base = OTHER; note = 2'-deoxythymidine-3'-phosphorothioate
  misc_feature 1..19: note = RNA
  misc_feature 20..21: note = DNA
ccatgaccctgccctcgattt

SEQ ID NO: 377 - DNA, 21 bp, synthetic construct
  source 1..21: mol_type = other DNA
  modified_base 1: mod_base = OTHER; note = 2'-O-methylcytidine-3'-phosphate
  modified_base 2: mod_base = OTHER; note = guanosine-3'-phosphate
  modified_base 3: mod_base = OTHER; note = adenosine-3'-phosphate
  modified_base 4: mod_base = OTHER; note = guanosine-3'-phosphate
  modified_base 5: mod_base = OTHER; note = guanosine-3'-phosphate
  modified_base 6: mod_base = OTHER; note = guanosine-3'-phosphate
  modified_base 7: mod_base = OTHER; note = 2'-O-methylcytidine-3'-phosphate
  modified_base 8: mod_base = OTHER; note = adenosine-3'-phosphate
  modified_base 9: mod_base = OTHER; note = guanosine-3'-phosphate
  modified_base 10: mod_base = OTHER; note = guanosine-3'-phosphate
  modified_base 11: mod_base = OTHER; note = guanosine-3'-phosphate
  modified_base 12: mod_base = OTHER; note = 2'-O-methyluridine-3'-phosphate
  modified_base 13: mod_base = OTHER; note = 2'-O-methylcytidine-3'-phosphate
  modified_base 14: mod_base = OTHER; note = adenosine-3'-phosphate
  modified_base 15: mod_base = OTHER; note = 2'-O-methyluridine-3'-phosphate
  modified_base 16: mod_base = OTHER; note = guanosine-3'-phosphate
  modified_base 17: mod_base = OTHER; note = guanosine-3'-phosphate
  modified_base 18: mod_base = OTHER; note = 2'-O-methyluridine-3'-phosphate
  modified_base 19: mod_base = OTHER; note = 2'-O-methylcytidine-3'-phosphate
  modified_base 20: mod_base = OTHER; note = 2'-deoxythymidine-3'-phosphorothioate
  misc_feature 1..19: note = RNA
  misc_feature 20..21: note = DNA
cgagggcagggtcatggtctt

SEQ ID NO: 378 - DNA, 21 bp, synthetic construct
  source 1..21: mol_type = other DNA
  modified_base 1: mod_base = OTHER; note = guanosine-3'-phosphate
  modified_base 2: mod_base = OTHER; note = adenosine-3'-phosphate
  modified_base 3: mod_base = OTHER; note = cytidine-3'-phosphate
  modified_base 4: mod_base = OTHER; note = 2'-O-methylcytidine-3'-phosphate
  modified_base 5: mod_base = OTHER; note = adenosine-3'-phosphate
  modified_base 6: mod_base = OTHER; note = uridine-3'-phosphate
  modified_base 7: mod_base = OTHER; note = guanosine-3'-phosphate
  modified_base 8: mod_base = OTHER; note = adenosine-3'-phosphate
  modified_base 9: mod_base = OTHER; note = cytidine-3'-phosphate
  modified_base 10: mod_base = OTHER; note = cytidine-3'-phosphate
  modified_base 11: mod_base = OTHER; note = cytidine-3'-phosphate
  modified_base 12: mod_base = OTHER; note = uridine-3'-phosphate
  modified_base 13: mod_base = OTHER; note = guanosine-3'-phosphate
  modified_base 14: mod_base = OTHER; note = cytidine-3'-phosphate
  modified_base 15: mod_base = OTHER; note = cytidine-3'-phosphate
  modified_base 16: mod_base = OTHER; note = cytidine-3'-phosphate
  modified_base 17: mod_base = OTHER; note = uridine-3'-phosphate
  modified_base 18: mod_base = OTHER; note = cytidine-3'-phosphate
  modified_base 19: mod_base = OTHER; note = guanosine-3'-phosphate
  modified_base 20: mod_base = OTHER; note = 2'-deoxythymidine-3'-phosphorothioate
  misc_feature 1..19: note = RNA
  misc_feature 20..21: note = DNA
gaccatgaccctgccctcgtt

SEQ ID NO: 379 - DNA, 21 bp, synthetic construct
  source 1..21: mol_type = other DNA
  modified_base 1: mod_base = OTHER; note = guanosine-3'-phosphate
  modified_base 2: mod_base = OTHER; note = adenosine-3'-phosphate
  modified_base 3: mod_base = OTHER; note = guanosine-3'-phosphate
  modified_base 4: mod_base = OTHER; note = guanosine-3'-phosphate
  modified_base 5: mod_base = OTHER; note = guanosine-3'-phosphate
  modified_base 6: mod_base = OTHER; note = cytidine-3'-phosphate
  modified_base 7: mod_base = OTHER; note = adenosine-3'-phosphate
  modified_base 8: mod_base = OTHER; note = guanosine-3'-phosphate
  modified_base 9: mod_base = OTHER; note = guanosine-3'-phosphate
  modified_base 10: mod_base = OTHER; note = guanosine-3'-phosphate
  modified_base 11: mod_base = OTHER; note = uridine-3'-phosphate
  modified_base 12: mod_base = OTHER; note = cytidine-3'-phosphate
  modified_base 13: mod_base = OTHER; note = adenosine-3'-phosphate
  modified_base 14: mod_base = OTHER; note = uridine-3'-phosphate
  modified_base 15: mod_base = OTHER; note = guanosine-3'-phosphate
  modified_base 16: mod_base = OTHER; note = guanosine-3'-phosphate
  modified_base 17: mod_base = OTHER; note = uridine-3'-phosphate
  modified_base 18: mod_base = OTHER; note = cytidine-3'-phosphate
  modified_base 19: mod_base = OTHER; note = adenosine-3'-phosphate
  modified_base 20: mod_base = OTHER; note = 2'-deoxythymidine-3'-phosphorothioate
  misc_feature 1..19: note = RNA
  misc_feature 20..21: note = DNA
gagggcagggtcatggtcatt

SEQ ID NO: 380 - DNA, 21 bp, synthetic construct
  source 1..21: mol_type = other DNA
  modified_base 1: mod_base = OTHER; note = uridine-3'-phosphate
  modified_base 2: mod_base = OTHER; note = guanosine-3'-phosphate
  modified_base 3: mod_base = OTHER; note = adenosine-3'-phosphate
  modified_base 4: mod_base = OTHER; note = cytidine-3'-phosphate
  modified_base 5: mod_base = OTHER; note = cytidine-3'-phosphate
  modified_base 6: mod_base = OTHER; note = adenosine-3'-phosphate
  modified_base 7: mod_base = OTHER; note = uridine-3'-phosphate
  modified_base 8: mod_base = OTHER; note = guanosine-3'-phosphate
  modified_base 9: mod_base = OTHER; note = adenosine-3'-phosphate
  modified_base 10: mod_base = OTHER; note = cytidine-3'-phosphate
  modified_base 11: mod_base = OTHER; note = cytidine-3'-phosphate
  modified_base 12: mod_base = OTHER; note = cytidine-3'-phosphate
  modified_base 13: mod_base = OTHER; note = uridine-3'-phosphate
  modified_base 14: mod_base = OTHER; note = guanosine-3'-phosphate
  modified_base 15: mod_base = OTHER; note = cytidine-3'-phosphate
  modified_base 16: mod_base = OTHER; note = cytidine-3'-phosphate
  modified_base 17: mod_base = OTHER; note = cytidine-3'-phosphate
  modified_base 18: mod_base = OTHER; note = uridine-3'-phosphate
  modified_base 19: mod_base = OTHER; note = cytidine-3'-phosphate
  modified_base 20: mod_base = OTHER; note = 2'-deoxythymidine-3'-phosphorothioate
  misc_feature 1..19: note = RNA
  misc_feature 20..21: note = DNA
tgaccatgaccctgccctctt

SEQ ID NO: 381 - DNA, 21 bp, synthetic construct
  source 1..21: mol_type = other DNA
  modified_base 1: mod_base = OTHER; note = guanosine-3'-phosphate
  modified_base 2: mod_base = OTHER; note = adenosine-3'-phosphate
  modified_base 3: mod_base = OTHER; note = guanosine-3'-phosphate
  modified_base 4: mod_base = OTHER; note = guanosine-3'-phosphate
  modified_base 5: mod_base = OTHER; note = guanosine-3'-phosphate
  modified_base 6: mod_base = OTHER; note = 2'-O-methylcytidine-3'-phosphate
  modified_base 7: mod_base = OTHER; note = adenosine-3'-phosphate
  modified_base 8: mod_base = OTHER; note = guanosine-3'-phosphate
  modified_base 9: mod_base = OTHER; note = guanosine-3'-phosphate
  modified_base 10: mod_base = OTHER; note = guanosine-3'-phosphate
  modified_base 11: mod_base = OTHER; note = 2'-O-methyluridine-3'-phosphate
  modified_base 12: mod_base = OTHER; note = 2'-O-methylcytidine-3'-phosphate
  modified_base 13: mod_base = OTHER; note = adenosine-3'-phosphate
  modified_base 14: mod_base = OTHER; note = 2'-O-methyluridine-3'-phosphate
  modified_base 15: mod_base = OTHER; note = guanosine-3'-phosphate
  modified_base 16: mod_base = OTHER; note = guanosine-3'-phosphate
  modified_base 17: mod_base = OTHER; note = 2'-O-methyluridine-3'-phosphate
  modified_base 18: mod_base = OTHER; note = 2'-O-methylcytidine-3'-phosphate
  modified_base 19: mod_base = OTHER; note = adenosine-3'-phosphate
  modified_base 20: mod_base = OTHER; note = 2'-deoxythymidine-3'-phosphorothioate
  misc_feature 1..19: note = RNA
  misc_feature 20..21: note = DNA
gagggcagggtcatggtcatt

SEQ ID NO: 382 - DNA, 21 bp, synthetic construct
  source 1..21: mol_type = other DNA
  modified_base 1: mod_base = OTHER; note = uridine-3'-phosphate
  modified_base 2: mod_base = OTHER; note = guanosine-3'-phosphate
  modified_base 3: mod_base = OTHER; note = adenosine-3'-phosphate
  modified_base 4: mod_base = OTHER; note = cytidine-3'-phosphate
  modified_base 5: mod_base = OTHER; note = 2'-O-methylcytidine-3'-phosphate
  modified_base 6: mod_base = OTHER; note = adenosine-3'-phosphate
  modified_base 7: mod_base = OTHER; note = uridine-3'-phosphate
  modified_base 8: mod_base = OTHER; note = guanosine-3'-phosphate
  modified_base 9: mod_base = OTHER; note = adenosine-3'-phosphate
  modified_base 10: mod_base = OTHER; note = cytidine-3'-phosphate
  modified_base 11: mod_base = OTHER; note = cytidine-3'-phosphate
  modified_base 12: mod_base = OTHER; note = cytidine-3'-phosphate
  modified_base 13: mod_base = OTHER; note = uridine-3'-phosphate
  modified_base 14: mod_base = OTHER; note = guanosine-3'-phosphate
  modified_base 15: mod_base = OTHER; note = cytidine-3'-phosphate
  modified_base 16: mod_base = OTHER; note = cytidine-3'-phosphate
  modified_base 17: mod_base = OTHER; note = cytidine-3'-phosphate
  modified_base 18: mod_base = OTHER; note = uridine-3'-phosphate
  modified_base 19: mod_base = OTHER; note = cytidine-3'-phosphate
  modified_base 20: mod_base = OTHER; note = 2'-deoxythymidine-3'-phosphorothioate
  misc_feature 1..19: note = RNA
  misc_feature 20..21: note = DNA
tgaccatgaccctgccctctt

SEQ ID NO: 383 - DNA, 21 bp, synthetic construct
  source 1..21: mol_type = other DNA
  modified_base 1: mod_base = OTHER; note = guanosine-3'-phosphate
  modified_base 2: mod_base = OTHER; note = guanosine-3'-phosphate
  modified_base 3: mod_base = OTHER; note = guanosine-3'-phosphate
  modified_base 4: mod_base = OTHER; note = cytidine-3'-phosphate
  modified_base 5: mod_base = OTHER; note = adenosine-3'-phosphate
  modified_base 6: mod_base = OTHER; note = guanosine-3'-phosphate
  modified_base 7: mod_base = OTHER; note = guanosine-3'-phosphate
  modified_base 8: mod_base = OTHER; note = guanosine-3'-phosphate
  modified_base 9: mod_base = OTHER; note = uridine-3'-phosphate
  modified_base 10: mod_base = OTHER; note = cytidine-3'-phosphate
  modified_base 11: mod_base = OTHER; note = adenosine-3'-phosphate
  modified_base 12: mod_base = OTHER; note = uridine-3'-phosphate
  modified_base 13: mod_base = OTHER; note = guanosine-3'-phosphate
  modified_base 14: mod_base = OTHER; note = guanosine-3'-phosphate
  modified_base 15: mod_base = OTHER; note = uridine-3'-phosphate
  modified_base 16: mod_base = OTHER; note = cytidine-3'-phosphate
  modified_base 17: mod_base = OTHER; note = adenosine-3'-phosphate
  modified_base 18: mod_base = OTHER; note = cytidine-3'-phosphate
  modified_base 19: mod_base = OTHER; note = cytidine-3'-phosphate
  modified_base 20: mod_base = OTHER; note = 2'-deoxythymidine-3'-phosphorothioate
  misc_feature 1..19: note = RNA
  misc_feature 20..21: note = DNA
gggcagggtcatggtcacctt

SEQ ID NO: 384 - DNA, 21 bp, synthetic construct
  source 1..21: mol_type = other DNA
  modified_base 1: mod_base = OTHER; note = guanosine-3'-phosphate
  modified_base 2: mod_base = OTHER; note = guanosine-3'-phosphate
  modified_base 3: mod_base = OTHER; note = uridine-3'-phosphate
  modified_base 4: mod_base = OTHER; note = guanosine-3'-phosphate
  modified_base 5: mod_base = OTHER; note = adenosine-3'-phosphate
  modified_base 6: mod_base = OTHER; note = cytidine-3'-phosphate
  modified_base 7: mod_base = OTHER; note = cytidine-3'-phosphate
  modified_base 8: mod_base = OTHER; note = adenosine-3'-phosphate
  modified_base 9: mod_base = OTHER; note = uridine-3'-phosphate
  modified_base 10: mod_base = OTHER; note = guanosine-3'-phosphate
  modified_base 11: mod_base = OTHER; note = adenosine-3'-phosphate
  modified_base 12: mod_base = OTHER; note = cytidine-3'-phosphate
  modified_base 13: mod_base = OTHER; note = cytidine-3'-phosphate
  modified_base 14: mod_base = OTHER; note = cytidine-3'-phosphate
  modified_base 15: mod_base = OTHER; note = uridine-3'-phosphate
  modified_base 16: mod_base = OTHER; note = guanosine-3'-phosphate
  modified_base 17: mod_base = OTHER; note = cytidine-3'-phosphate
  modified_base 18: mod_base = OTHER; note = cytidine-3'-phosphate
  modified_base 19: mod_base = OTHER; note = cytidine-3'-phosphate
  modified_base 20: mod_base = OTHER; note = 2'-deoxythymidine-3'-phosphorothioate
  misc_feature 1..19: note = RNA
  misc_feature 20..21: note = DNA
ggtgaccatgaccctgccctt

SEQ ID NO: 385 - DNA, 21 bp, synthetic construct
  source 1..21: mol_type = other DNA
  modified_base 1: mod_base = OTHER; note = guanosine-3'-phosphate
  modified_base 2: mod_base = OTHER; note = guanosine-3'-phosphate
  modified_base 3: mod_base = OTHER; note = guanosine-3'-phosphate
  modified_base 4: mod_base = OTHER; note = 2'-O-methylcytidine-3'-phosphate
  modified_base 5: mod_base = OTHER; note = adenosine-3'-phosphate
  modified_base 6: mod_base = OTHER; note = guanosine-3'-phosphate
  modified_base 7: mod_base = OTHER; note = guanosine-3'-phosphate
  modified_base 8: mod_base = OTHER; note = guanosine-3'-phosphate
  modified_base 9: mod_base = OTHER; note = 2'-O-methyluridine-3'-phosphate
  modified_base 10: mod_base = OTHER; note = 2'-O-methylcytidine-3'-phosphate
  modified_base 11: mod_base = OTHER; note = adenosine-3'-phosphate
  modified_base 12: mod_base = OTHER; note = 2'-O-methyluridine-3'-phosphate
  modified_base 13: mod_base = OTHER; note = guanosine-3'-phosphate
  modified_base 14: mod_base = OTHER; note = guanosine-3'-phosphate
  modified_base 15: mod_base = OTHER; note = 2'-O-methyluridine-3'-phosphate
  modified_base 16: mod_base = OTHER; note = 2'-O-methylcytidine-3'-phosphate
  modified_base 17: mod_base = OTHER; note = adenosine-3'-phosphate
  modified_base 18: mod_base = OTHER; note = 2'-O-methylcytidine-3'-phosphate
  modified_base 19: mod_base = OTHER; note = 2'-O-methylcytidine-3'-phosphate
  modified_base 20: mod_base = OTHER; note = 2'-deoxythymidine-3'-phosphorothioate
  misc_feature 1..19: note = RNA
  misc_feature 20..21: note = DNA
gggcagggtcatggtcacctt

SEQ ID NO: 386 - DNA, 21 bp, synthetic construct
  source 1..21: mol_type = other DNA
  modified_base 1: mod_base = OTHER; note = guanosine-3'-phosphate
  modified_base 2: mod_base = OTHER; note = guanosine-3'-phosphate
  modified_base 3: mod_base = OTHER; note = uridine-3'-phosphate
  modified_base 4: mod_base = OTHER; note = guanosine-3'-phosphate
  modified_base 5: mod_base = OTHER; note = adenosine-3'-phosphate
  modified_base 6: mod_base = OTHER; note = cytidine-3'-phosphate
  modified_base 7: mod_base = OTHER; note = 2'-O-methylcytidine-3'-phosphate
  modified_base 8: mod_base = OTHER; note = adenosine-3'-phosphate
  modified_base 9: mod_base = OTHER; note = uridine-3'-phosphate
  modified_base 10: mod_base = OTHER; note = guanosine-3'-phosphate
  modified_base 11: mod_base = OTHER; note = adenosine-3'-phosphate
  modified_base 12: mod_base = OTHER; note = cytidine-3'-phosphate
  modified_base 13: mod_base = OTHER; note = cytidine-3'-phosphate
  modified_base 14: mod_base = OTHER; note = cytidine-3'-phosphate
  modified_base 15: mod_base = OTHER; note = uridine-3'-phosphate
  modified_base 16: mod_base = OTHER; note = guanosine-3'-phosphate
  modified_base 17: mod_base = OTHER; note = cytidine-3'-phosphate
  modified_base 18: mod_base = OTHER; note = cytidine-3'-phosphate
  modified_base 19: mod_base = OTHER; note = cytidine-3'-phosphate
  modified_base 20: mod_base = OTHER; note = 2'-deoxythymidine-3'-phosphorothioate
  misc_feature 1..19: note = RNA
  misc_feature 20..21: note = DNA
ggtgaccatgaccctgccctt

SEQ ID NO: 387 - DNA, 21 bp, synthetic construct
  source 1..21: mol_type = other DNA
  modified_base 1: mod_base = OTHER; note = cytidine-3'-phosphate
  modified_base 2: mod_base = OTHER; note = adenosine-3'-phosphate
  modified_base 3: mod_base = OTHER; note = guanosine-3'-phosphate
  modified_base 4: mod_base = OTHER; note = guanosine-3'-phosphate
  modified_base 5: mod_base = OTHER; note = guanosine-3'-phosphate
  modified_base 6: mod_base = OTHER; note = uridine-3'-phosphate
  modified_base 7: mod_base = OTHER; note = cytidine-3'-phosphate
  modified_base 8: mod_base = OTHER; note = adenosine-3'-phosphate
  modified_base 9: mod_base = OTHER; note = uridine-3'-phosphate
  modified_base 10: mod_base = OTHER; note = guanosine-3'-phosphate
  modified_base 11: mod_base = OTHER; note = guanosine-3'-phosphate
  modified_base 12: mod_base = OTHER; note = uridine-3'-phosphate
  modified_base 13: mod_base = OTHER; note = cytidine-3'-phosphate
  modified_base 14: mod_base = OTHER; note = adenosine-3'-phosphate
  modified_base 15: mod_base = OTHER; note = cytidine-3'-phosphate
  modified_base 16: mod_base = OTHER; note = cytidine-3'-phosphate
  modified_base 17: mod_base = OTHER; note = guanosine-3'-phosphate
  modified_base 18: mod_base = OTHER; note = adenosine-3'-phosphate
  modified_base 19: mod_base = OTHER; note = cytidine-3'-phosphate
  modified_base 20: mod_base = OTHER; note = 2'-deoxythymidine-3'-phosphorothioate
  misc_feature 1..19: note = RNA
  misc_feature 20..21: note = DNA
cagggtcatggtcaccgactt

SEQ ID NO: 388 - DNA, 21 bp, synthetic construct
  source 1..21: mol_type = other DNA
  modified_base 1: mod_base = OTHER; note = guanosine-3'-phosphate
  modified_base 2: mod_base = OTHER; note = uridine-3'-phosphate
  modified_base 3: mod_base = OTHER; note = cytidine-3'-phosphate
  modified_base 4: mod_base = OTHER; note = guanosine-3'-phosphate
  modified_base 5: mod_base = OTHER; note = guanosine-3'-phosphate
  modified_base 6: mod_base = OTHER; note = uridine-3'-phosphate
  modified_base 7: mod_base = OTHER; note = guanosine-3'-phosphate
  modified_base 8: mod_base = OTHER; note = adenosine-3'-phosphate
  modified_base 9: mod_base = OTHER; note = cytidine-3'-phosphate
  modified_base 10: mod_base = OTHER; note = cytidine-3'-phosphate
  modified_base 11: mod_base = OTHER; note = adenosine-3'-phosphate
  modified_base 12: mod_base = OTHER; note = uridine-3'-phosphate
  modified_base 13: mod_base = OTHER; note = guanosine-3'-phosphate
  modified_base 14: mod_base = OTHER; note = adenosine-3'-phosphate
  modified_base 15: mod_base = OTHER; note = cytidine-3'-phosphate
  modified_base 16: mod_base = OTHER; note = cytidine-3'-phosphate
  modified_base 17: mod_base = OTHER; note = cytidine-3'-phosphate
  modified_base 18: mod_base = OTHER; note = uridine-3'-phosphate
  modified_base 19: mod_base = OTHER; note = guanosine-3'-phosphate
  modified_base 20: mod_base = OTHER; note = 2'-deoxythymidine-3'-phosphorothioate
  misc_feature 1..19: note = RNA
  misc_feature 20..21: note = DNA
gtcggtgaccatgaccctgtt

SEQ ID NO: 389 - DNA, 21 bp, synthetic construct
  source 1..21: mol_type = other DNA
  modified_base 1: mod_base = OTHER; note = 2'-O-methylcytidine-3'-phosphate
  modified_base 2: mod_base = OTHER; note = adenosine-3'-phosphate
  modified_base 3: mod_base = OTHER; note = guanosine-3'-phosphate
  modified_base 4: mod_base = OTHER; note = guanosine-3'-phosphate
  modified_base 5: mod_base = OTHER; note = guanosine-3'-phosphate
  modified_base 6: mod_base = OTHER; note = 2'-O-methyluridine-3'-phosphate
  modified_base 7: mod_base = OTHER; note = 2'-O-methylcytidine-3'-phosphate
  modified_base 8: mod_base = OTHER; note = adenosine-3'-phosphate
  modified_base 9: mod_base = OTHER; note = 2'-O-methyluridine-3'-phosphate
  modified_base 10: mod_base = OTHER; note = guanosine-3'-phosphate
  modified_base 11: mod_base = OTHER; note = guanosine-3'-phosphate
  modified_base 12: mod_base = OTHER; note = 2'-O-methyluridine-3'-phosphate
  modified_base 13: mod_base = OTHER; note = 2'-O-methylcytidine-3'-phosphate
  modified_base 14: mod_base = OTHER; note = adenosine-3'-phosphate
  modified_base 15: mod_base = OTHER; note = 2'-O-methylcytidine-3'-phosphate
  modified_base 16: mod_base = OTHER; note = 2'-O-methylcytidine-3'-phosphate
  modified_base 17: mod_base = OTHER; note = guanosine-3'-phosphate
  modified_base 18: mod_base = OTHER; note = adenosine-3'-phosphate
  modified_base 19: mod_base = OTHER; note = 2'-O-methylcytidine-3'-phosphate
  modified_base 20: mod_base = OTHER; note = 2'-deoxythymidine-3'-phosphorothioate
  misc_feature 1..19: note = RNA
  misc_feature 20..21: note = DNA
cagggtcatggtcaccgactt

SEQ ID NO: 390 - DNA, 21 bp, synthetic construct
  source 1..21: mol_type = other DNA
  modified_base 1: mod_base = OTHER; note = guanosine-3'-phosphate
  modified_base 2: mod_base = OTHER; note = uridine-3'-phosphate
  modified_base 3: mod_base = OTHER; note = cytidine-3'-phosphate
  modified_base 4: mod_base = OTHER; note = guanosine-3'-phosphate
  modified_base 5: mod_base = OTHER; note = guanosine-3'-phosphate
  modified_base 6: mod_base = OTHER; note = uridine-3'-phosphate
  modified_base 7: mod_base = OTHER; note = guanosine-3'-phosphate
  modified_base 8: mod_base = OTHER; note = adenosine-3'-phosphate
  modified_base 9: mod_base = OTHER; note = cytidine-3'-phosphate
  modified_base 10: mod_base = OTHER; note = 2'-O-methylcytidine-3'-phosphate
  modified_base 11: mod_base = OTHER; note = adenosine-3'-phosphate
  modified_base 12: mod_base = OTHER; note = uridine-3'-phosphate
  modified_base 13: mod_base = OTHER; note = guanosine-3'-phosphate
  modified_base 14: mod_base = OTHER; note = adenosine-3'-phosphate
  modified_base 15: mod_base = OTHER; note = cytidine-3'-phosphate
  modified_base 16: mod_base = OTHER; note = cytidine-3'-phosphate
  modified_base 17: mod_base = OTHER; note = cytidine-3'-phosphate
  modified_base 18: mod_base = OTHER; note = uridine-3'-phosphate
  modified_base 19: mod_base = OTHER; note = guanosine-3'-phosphate
  modified_base 20: mod_base = OTHER; note = 2'-deoxythymidine-3'-phosphorothioate
  misc_feature 1..19: note = RNA
  misc_feature 20..21: note = DNA
gtcggtgaccatgaccctgtt

SEQ ID NO: 391 - DNA, 21 bp, synthetic construct
  source 1..21: mol_type = other DNA
  modified_base 1: mod_base = OTHER; note = adenosine-3'-phosphate
  modified_base 2: mod_base = OTHER; note = guanosine-3'-phosphate
  modified_base 3: mod_base = OTHER; note = guanosine-3'-phosphate
  modified_base 4: mod_base = OTHER; note = guanosine-3'-phosphate
  modified_base 5: mod_base = OTHER; note = uridine-3'-phosphate
  modified_base 6: mod_base = OTHER; note = cytidine-3'-phosphate
  modified_base 7: mod_base = OTHER; note = adenosine-3'-phosphate
  modified_base 8: mod_base = OTHER; note = uridine-3'-phosphate
  modified_base 9: mod_base = OTHER; note = guanosine-3'-phosphate
  modified_base 10: mod_base = OTHER; note = guanosine-3'-phosphate
  modified_base 11: mod_base = OTHER; note = uridine-3'-phosphate
  modified_base 12: mod_base = OTHER; note = cytidine-3'-phosphate
  modified_base 13: mod_base = OTHER; note = adenosine-3'-phosphate
  modified_base 14: mod_base = OTHER; note = cytidine-3'-phosphate
  modified_base 15: mod_base = OTHER; note = cytidine-3'-phosphate
  modified_base 16: mod_base = OTHER; note = guanosine-3'-phosphate
  modified_base 17: mod_base = OTHER; note = adenosine-3'-phosphate
  modified_base 18: mod_base = OTHER; note = cytidine-3'-phosphate
  modified_base 19: mod_base = OTHER; note = uridine-3'-phosphate
  modified_base 20: mod_base = OTHER; note = 2'-deoxythymidine-3'-phosphorothioate
  misc_feature 1..19: note = RNA
  misc_feature 20..21: note = DNA
agggtcatggtcaccgacttt

SEQ ID NO: 392 - DNA, 21 bp, synthetic construct
  source 1..21: mol_type = other DNA
  modified_base 1: mod_base = OTHER; note = adenosine-3'-phosphate
  modified_base 2: mod_base = OTHER; note = guanosine-3'-phosphate
  modified_base 3: mod_base = OTHER; note = uridine-3'-phosphate
  modified_base 4: mod_base = OTHER; note = cytidine-3'-phosphate
  modified_base 5: mod_base = OTHER; note = guanosine-3'-phosphate
  modified_base 6: mod_base = OTHER; note = guanosine-3'-phosphate
  modified_base 7: mod_base = OTHER; note = uridine-3'-phosphate
  modified_base 8: mod_base = OTHER; note = guanosine-3'-phosphate
  modified_base 9: mod_base = OTHER; note = adenosine-3'-phosphate
  modified_base 10: mod_base = OTHER; note = cytidine-3'-phosphate
  modified_base 11: mod_base = OTHER; note = cytidine-3'-phosphate
  modified_base 12: mod_base = OTHER; note = adenosine-3'-phosphate
  modified_base 13: mod_base = OTHER; note = uridine-3'-phosphate
  modified_base 14: mod_base = OTHER; note = guanosine-3'-phosphate
  modified_base 15: mod_base = OTHER; note = adenosine-3'-phosphate
  modified_base 16: mod_base = OTHER; note = cytidine-3'-phosphate
  modified_base 17: mod_base = OTHER; note = cytidine-3'-phosphate
  modified_base 18: mod_base = OTHER; note = cytidine-3'-phosphate
  modified_base 19: mod_base = OTHER; note = uridine-3'-phosphate
  modified_base 20: mod_base = OTHER; note = 2'-deoxythymidine-3'-phosphorothioate
  misc_feature 1..19: note = RNA
  misc_feature 20..21: note = DNA
agtcggtgaccatgacccttt

SEQ ID NO: 393 - DNA, 21 bp, synthetic construct
  source 1..21: mol_type = other DNA
  modified_base 1: mod_base = OTHER; note = adenosine-3'-phosphate
  modified_base 2: mod_base = OTHER; note = guanosine-3'-phosphate
  modified_base 3: mod_base = OTHER; note = guanosine-3'-phosphate
  modified_base 4: mod_base = OTHER; note = guanosine-3'-phosphate
  modified_base 5: mod_base = OTHER; note = 2'-O-methyluridine-3'-phosphate
  modified_base 6: mod_base = OTHER; note = 2'-O-methylcytidine-3'-phosphate
  modified_base 7: mod_base = OTHER; note = adenosine-3'-phosphate
  modified_base 8: mod_base = OTHER; note = 2'-O-methyluridine-3'-phosphate
  modified_base 9: mod_base = OTHER; note = guanosine-3'-phosphate
  modified_base 10: mod_base = OTHER; note = guanosine-3'-phosphate
  modified_base 11: mod_base = OTHER; note = 2'-O-methyluridine-3'-phosphate
  modified_base 12: mod_base = OTHER; note = 2'-O-methylcytidine-3'-phosphate
  modified_base 13: mod_base = OTHER; note = adenosine-3'-phosphate
  modified_base 14: mod_base = OTHER; note = 2'-O-methylcytidine-3'-phosphate
  modified_base 15: mod_base = OTHER; note = 2'-O-methylcytidine-3'-phosphate
  modified_base 16: mod_base = OTHER; note = guanosine-3'-phosphate
  modified_base 17: mod_base = OTHER; note = adenosine-3'-phosphate
  modified_base 18: mod_base = OTHER; note = 2'-O-methylcytidine-3'-phosphate
  modified_base 19: mod_base = OTHER; note = 2'-O-methyluridine-3'-phosphate
  modified_base 20: mod_base = OTHER; note = 2'-deoxythymidine-3'-phosphorothioate
  misc_feature 1..19: note = RNA
  misc_feature 20..21: note = DNA
agggtcatggtcaccgacttt

SEQ ID NO: 394 - DNA, 21 bp, synthetic construct
  source 1..21: mol_type = other DNA
  modified_base 1: mod_base = OTHER; note = adenosine-3'-phosphate
  modified_base 2: mod_base = OTHER; note = guanosine-3'-phosphate
  modified_base 3: mod_base = OTHER; note = uridine-3'-phosphate
  modified_base 4: mod_base = OTHER; note = cytidine-3'-phosphate
  modified_base 5: mod_base = OTHER; note = guanosine-3'-phosphate
  modified_base 6: mod_base = OTHER; note = guanosine-3'-phosphate
  modified_base 7: mod_base = OTHER; note = uridine-3'-phosphate
  modified_base 8: mod_base = OTHER; note = guanosine-3'-phosphate
  modified_base 9: mod_base = OTHER; note = adenosine-3'-phosphate
  modified_base 10: mod_base = OTHER; note = cytidine-3'-phosphate
  modified_base 11: mod_base = OTHER; note = 2'-O-methylcytidine-3'-phosphate
  modified_base 12: mod_base = OTHER; note = adenosine-3'-phosphate
  modified_base 13: mod_base = OTHER; note = uridine-3'-phosphate
  modified_base 14: mod_base = OTHER; note = guanosine-3'-phosphate
  modified_base 15: mod_base = OTHER; note = adenosine-3'-phosphate
  modified_base 16: mod_base = OTHER; note = cytidine-3'-phosphate
  modified_base 17: mod_base = OTHER; note = cytidine-3'-phosphate
  modified_base 18: mod_base = OTHER; note = cytidine-3'-phosphate
  modified_base 19: mod_base = OTHER; note = uridine-3'-phosphate
  modified_base 20: mod_base = OTHER; note = 2'-deoxythymidine-3'-phosphorothioate
  misc_feature 1..19: note = RNA
  misc_feature 20..21: note = DNA
agtcggtgaccatgacccttt

SEQ ID NO: 395 - DNA, 21 bp, synthetic construct
  source 1..21: mol_type = other DNA
  modified_base 1: mod_base = OTHER; note = adenosine-3'-phosphate
  modified_base 2: mod_base = OTHER; note = uridine-3'-phosphate
  modified_base 3: mod_base = OTHER; note = guanosine-3'-phosphate
  modified_base 4: mod_base = OTHER; note = guanosine-3'-phosphate
  modified_base 5: mod_base = OTHER; note = uridine-3'-phosphate
  modified_base 6: mod_base = OTHER; note = cytidine-3'-phosphate
  modified_base 7: mod_base = OTHER; note = adenosine-3'-phosphate
  modified_base 8: mod_base = OTHER; note = cytidine-3'-phosphate
  modified_base 9: mod_base = OTHER; note = cytidine-3'-phosphate
  modified_base 10: mod_base = OTHER; note = guanosine-3'-phosphate
  modified_base 11: mod_base = OTHER; note = adenosine-3'-phosphate
  modified_base 12: mod_base = OTHER; note = cytidine-3'-phosphate
  modified_base 13: mod_base = OTHER; note = uridine-3'-phosphate
  modified_base 14: mod_base = OTHER; note = uridine-3'-phosphate
  modified_base 15: mod_base = OTHER; note = cytidine-3'-phosphate
  modified_base 16: mod_base = OTHER; note = guanosine-3'-phosphate
  modified_base 17: mod_base = OTHER; note = adenosine-3'-phosphate
  modified_base 18: mod_base = OTHER; note = guanosine-3'-phosphate
  modified_base 19: mod_base = OTHER; note = adenosine-3'-phosphate
  modified_base 20: mod_base = OTHER; note = 2'-deoxythymidine-3'-phosphorothioate
  misc_feature 1..19: note = RNA
  misc_feature 20..21: note = DNA
atggtcaccgacttcgagatt

SEQ ID NO: 396 - DNA, 21 bp, synthetic construct
  source 1..21: mol_type = other DNA
  modified_base 1: mod_base = OTHER; note = uridine-3'-phosphate
  modified_base 2: mod_base = OTHER; note = cytidine-3'-phosphate
  modified_base 3: mod_base = OTHER; note = uridine-3'-phosphate
  modified_base 4: mod_base = OTHER; note = cytidine-3'-phosphate
  modified_base 5: mod_base = OTHER; note = guanosine-3'-phosphate
  modified_base 6: mod_base = OTHER; note = adenosine-3'-phosphate
  modified_base 7: mod_base = OTHER; note = adenosine-3'-phosphate
  modified_base 8: mod_base = OTHER; note = guanosine-3'-phosphate
  modified_base 9: mod_base = OTHER; note = uridine-3'-phosphate
  modified_base 10: mod_base = OTHER; note = cytidine-3'-phosphate
  modified_base 11: mod_base = OTHER; note = guanosine-3'-phosphate
  modified_base 12: mod_base = OTHER; note = guanosine-3'-phosphate
  modified_base 13: mod_base = OTHER; note = uridine-3'-phosphate
  modified_base 14: mod_base = OTHER; note = guanosine-3'-phosphate
  modified_base 15: mod_base = OTHER; note = adenosine-3'-phosphate
  modified_base 16: mod_base = OTHER; note = cytidine-3'-phosphate
  modified_base 17: mod_base = OTHER; note = cytidine-3'-phosphate
  modified_base 18: mod_base = OTHER; note = adenosine-3'-phosphate
  modified_base 19: mod_base = OTHER; note = uridine-3'-phosphate
  modified_base 20: mod_base = OTHER; note = 2'-deoxythymidine-3'-phosphorothioate
  misc_feature 1..19: note = RNA
  misc_feature 20..21: note = DNA
tctcgaagtcggtgaccattt

SEQ ID NO: 397 - DNA, 21 bp, synthetic construct
  source 1..21: mol_type = other DNA
  modified_base 1: mod_base = OTHER; note = adenosine-3'-phosphate
  modified_base 2: mod_base = OTHER; note = 2'-O-methyluridine-3'-phosphate
  modified_base 3: mod_base = OTHER; note = guanosine-3'-phosphate
  modified_base 4: mod_base = OTHER; note = guanosine-3'-phosphate
  modified_base 5: mod_base = OTHER; note = 2'-O-methyluridine-3'-phosphate
  modified_base 6: mod_base = OTHER; note = 2'-O-methylcytidine-3'-phosphate
  modified_base 7: mod_base = OTHER; note = adenosine-3'-phosphate
  modified_base 8: mod_base = OTHER; note = 2'-O-methylcytidine-3'-phosphate
  modified_base 9: mod_base = OTHER; note = 2'-O-methylcytidine-3'-phosphate
  modified_base 10: mod_base = OTHER; note = guanosine-3'-phosphate
  modified_base 11: mod_base = OTHER; note = adenosine-3'-phosphate
  modified_base 12: mod_base = OTHER; note = 2'-O-methylcytidine-3'-phosphate
  modified_base 13: mod_base = OTHER; note = 2'-O-methyluridine-3'-phosphate
  modified_base 14: mod_base = OTHER; note = 2'-O-methyluridine-3'-phosphate
  modified_base 15: mod_base = OTHER; note = 2'-O-methylcytidine-3'-phosphate
  modified_base 16: mod_base = OTHER; note = guanosine-3'-phosphate
  modified_base 17: mod_base = OTHER; note = adenosine-3'-phosphate
  modified_base 18: mod_base = OTHER; note = guanosine-3'-phosphate
  modified_base 19: mod_base = OTHER; note = adenosine-3'-phosphate
  modified_base 20: mod_base = OTHER; note = 2'-deoxythymidine-3'-phosphorothioate
  misc_feature 1..19: note = RNA
  misc_feature 20..21: note = DNA
atggtcaccgacttcgagatt

SEQ ID NO: 398 - DNA, 21 bp, synthetic construct
  source 1..21: mol_type = other DNA
  modified_base 1: mod_base = OTHER; note = uridine-3'-phosphate
  modified_base 2: mod_base = OTHER; note = cytidine-3'-phosphate
  modified_base 3: mod_base = OTHER; note = uridine-3'-phosphate
  modified_base 4: mod_base = OTHER; note = cytidine-3'-phosphate
  modified_base 5: mod_base = OTHER; note = guanosine-3'-phosphate
  modified_base 6: mod_base = OTHER; note = adenosine-3'-phosphate
  modified_base 7: mod_base = OTHER; note = adenosine-3'-phosphate
  modified_base 8: mod_base = OTHER; note = guanosine-3'-phosphate
  modified_base 9: mod_base = OTHER; note = uridine-3'-phosphate
  modified_base 10: mod_base = OTHER; note = cytidine-3'-phosphate
  modified_base 11: mod_base = OTHER; note = guanosine-3'-phosphate
  modified_base 12: mod_base = OTHER; note = guanosine-3'-phosphate
  modified_base 13: mod_base = OTHER; note = uridine-3'-phosphate
  modified_base 14: mod_base = OTHER; note = guanosine-3'-phosphate
  modified_base 15: mod_base = OTHER; note = adenosine-3'-phosphate
  modified_base 16: mod_base = OTHER; note = cytidine-3'-phosphate
  modified_base 17: mod_base = OTHER; note = 2'-O-methylcytidine-3'-phosphate
  modified_base 18: mod_base = OTHER; note = adenosine-3'-phosphate
  modified_base 19: mod_base = OTHER; note = uridine-3'-phosphate
  modified_base 20: mod_base = OTHER; note = 2'-deoxythymidine-3'-phosphorothioate
  misc_feature 1..19: note = RNA
  misc_feature 20..21: note = DNA
tctcgaagtcggtgaccattt

SEQ ID NO: 399 - DNA, 21 bp, synthetic construct
  source 1..21: mol_type = other DNA
  modified_base 1: mod_base = OTHER; note = cytidine-3'-phosphate
  modified_base 2: mod_base = OTHER; note = cytidine-3'-phosphate
  modified_base 3: mod_base = OTHER; note = guanosine-3'-phosphate
  modified_base 4: mod_base = OTHER; note = adenosine-3'-phosphate
  modified_base 5: mod_base = OTHER; note = cytidine-3'-phosphate
  modified_base 6: mod_base = OTHER; note = uridine-3'-phosphate
  modified_base 7: mod_base = OTHER; note = uridine-3'-phosphate
  modified_base 8: mod_base = OTHER; note = cytidine-3'-phosphate
  modified_base 9: mod_base = OTHER; note = guanosine-3'-phosphate
  modified_base 10: mod_base = OTHER; note = adenosine-3'-phosphate
  modified_base 11: mod_base = OTHER; note = guanosine-3'-phosphate
  modified_base 12: mod_base = OTHER; note = adenosine-3'-phosphate
  modified_base 13: mod_base = OTHER; note = adenosine-3'-phosphate
  modified_base 14: mod_base = OTHER; note = uridine-3'-phosphate
  modified_base 15: mod_base = OTHER; note = guanosine-3'-phosphate
  modified_base 16: mod_base = OTHER; note = uridine-3'-phosphate
  modified_base 17: mod_base = OTHER; note = guanosine-3'-phosphate
  modified_base 18: mod_base = OTHER; note = cytidine-3'-phosphate
  modified_base 19: mod_base = OTHER; note = cytidine-3'-phosphate
  misc_feature 1..19: note = RNA
  misc_feature 20..21: note = DNA
ccgacttcgagaatgtgcctt

SEQ ID NO: 400 - DNA, 21 bp, synthetic construct
  source 1..21: mol_type = other DNA
  modified_base 1: mod_base = OTHER; note = guanosine-3'-phosphate
  modified_base 2: mod_base = OTHER; note = guanosine-3'-phosphate
  modified_base 3: mod_base = OTHER; note = cytidine-3'-phosphate
  modified_base 4: mod_base = OTHER; note = adenosine-3'-phosphate
  modified_base 5: mod_base = OTHER; note = cytidine-3'-phosphate
  modified_base 6: mod_base = OTHER; note = adenosine-3'-phosphate
  modified_base 7: mod_base = OTHER; note = uridine-3'-phosphate
  modified_base 8: mod_base = OTHER; note = uridine-3'-phosphate
  modified_base 9: mod_base = OTHER; note = cytidine-3'-phosphate
  modified_base 10: mod_base = OTHER; note = uridine-3'-phosphate
  modified_base 11: mod_base = OTHER; note = cytidine-3'-phosphate
  modified_base 12: mod_base = OTHER; note = guanosine-3'-phosphate
  modified_base 13: mod_base = OTHER; note = adenosine-3'-phosphate
  modified_base 14: mod_base = OTHER; note = adenosine-3'-phosphate
  modified_base 15: mod_base = OTHER; note = guanosine-3'-phosphate
  modified_base 16: mod_base = OTHER; note = uridine-3'-phosphate
  modified_base 17: mod_base = OTHER; note = cytidine-3'-phosphate
  modified_base 18: mod_base = OTHER; note = guanosine-3'-phosphate
  modified_base 19: mod_base = OTHER; note = guanosine-3'-phosphate
  misc_feature 1..19: note = RNA
  misc_feature 20..21: note = DNA
ggcacattctcgaagtcggtt

SEQ ID NO: 401 - DNA, 21 bp, synthetic construct
  source 1..21: mol_type = other DNA
  modified_base 1: mod_base = OTHER; note = guanosine-3'-phosphate
  modified_base 2: mod_base = OTHER; note = guanosine-3'-phosphate
  modified_base 3: mod_base = OTHER; note = adenosine-3'-phosphate
  modified_base 4: mod_base = OTHER; note = guanosine-3'-phosphate
  modified_base 5: mod_base = OTHER; note = guanosine-3'-phosphate
  modified_base 6: mod_base = OTHER; note = adenosine-3'-phosphate
  modified_base 7: mod_base = OTHER; note = cytidine-3'-phosphate
  modified_base 8: mod_base = OTHER; note = guanosine-3'-phosphate
  modified_base 9: mod_base = OTHER; note = guanosine-3'-phosphate
  modified_base 10: mod_base = OTHER; note = guanosine-3'-phosphate
  modified_base 11: mod_base = OTHER; note = adenosine-3'-phosphate
  modified_base 12: mod_base = OTHER; note = cytidine-3'-phosphate
  modified_base 13: mod_base = OTHER; note = cytidine-3'-phosphate
  modified_base 14: mod_base = OTHER; note = cytidine-3'-phosphate
  modified_base 15: mod_base = OTHER; note = guanosine-3'-phosphate
  modified_base 16: mod_base = OTHER; note = cytidine-3'-phosphate
  modified_base 17: mod_base = OTHER; note = uridine-3'-phosphate
  modified_base 18: mod_base = OTHER; note = uridine-3'-phosphate
  modified_base 19: mod_base = OTHER; note = cytidine-3'-phosphate
  misc_feature 1..19: note = RNA
  misc_feature 20..21: note = DNA
ggaggacgggacccgcttctt

SEQ ID NO: 402 - DNA, 21 bp, synthetic construct
  source 1..21: mol_type = other DNA
  modified_base 1: mod_base = OTHER; note = guanosine-3'-phosphate
  modified_base 2: mod_base = OTHER; note = adenosine-3'-phosphate
  modified_base 3: mod_base = OTHER; note = adenosine-3'-phosphate
  modified_base 4: mod_base = OTHER; note = guanosine-3'-phosphate
  modified_base 5: mod_base = OTHER; note = cytidine-3'-phosphate
  modified_base 6: mod_base = OTHER; note = guanosine-3'-phosphate
  modified_base 7: mod_base = OTHER; note = guanosine-3'-phosphate
  modified_base 8: mod_base = OTHER; note = guanosine-3'-phosphate
  modified_base 9: mod_base = OTHER; note = uridine-3'-phosphate
  modified_base 10: mod_base = OTHER; note = cytidine-3'-phosphate
  modified_base 11: mod_base = OTHER; note = cytidine-3'-phosphate
  modified_base 12: mod_base = OTHER; note = cytidine-3'-phosphate
  modified_base 13: mod_base = OTHER; note = guanosine-3'-phosphate
  modified_base 14: mod_base = OTHER; note = uridine-3'-phosphate
  modified_base 15: mod_base = OTHER; note = cytidine-3'-phosphate
  modified_base 16: mod_base = OTHER; note = cytidine-3'-phosphate
  modified_base 17: mod_base = OTHER; note = uridine-3'-phosphate
  modified_base 18: mod_base = OTHER; note = cytidine-3'-phosphate
  modified_base 19: mod_base = OTHER; note = cytidine-3'-phosphate
  misc_feature 1..19: note = RNA
  misc_feature 20..21: note = DNA
gaagcgggtcccgtcctcctt

SEQ ID NO: 403 - DNA, 21 bp, synthetic construct
  source 1..21: mol_type = other DNA
  modified_base 1: mod_base = OTHER; note = cytidine-3'-phosphate
  modified_base 2: mod_base = OTHER; note = adenosine-3'-phosphate
  modified_base 3: mod_base = OTHER; note = guanosine-3'-phosphate
  modified_base 4: mod_base = OTHER; note = cytidine-3'-phosphate
  modified_base 5: mod_base = OTHER; note = guanosine-3'-phosphate
  modified_base 6: mod_base = OTHER; note = guanosine-3'-phosphate
  modified_base 7: mod_base = OTHER; note = cytidine-3'-phosphate
  modified_base 8: mod_base = OTHER; note = cytidine-3'-phosphate
  modified_base 9: mod_base = OTHER; note = guanosine-3'-phosphate
  modified_base 10: mod_base = OTHER; note = guanosine-3'-phosphate
  modified_base 11: mod_base = OTHER; note = guanosine-3'-phosphate
  modified_base 12: mod_base = OTHER; note = adenosine-3'-phosphate
  modified_base 13: mod_base = OTHER; note = uridine-3'-phosphate
  modified_base 14: mod_base = OTHER; note = guanosine-3'-phosphate
  modified_base 15: mod_base = OTHER; note = cytidine-3'-phosphate
  modified_base 16: mod_base = OTHER; note = cytidine-3'-phosphate
  modified_base 17: mod_base = OTHER; note = guanosine-3'-phosphate
  modified_base 18: mod_base = OTHER; note = guanosine-3'-phosphate
  modified_base 19: mod_base = OTHER; note = cytidine-3'-phosphate
  modified_base 20: mod_base = OTHER; note = 2'-deoxythymidine-3'-phosphorothioate
  misc_feature 1..19: note = RNA
  misc_feature 20..21: note = DNA
cagcggccgggatgccggctt

SEQ ID NO: 404 - DNA, 21 bp, synthetic construct
  source 1..21: mol_type = other DNA
  modified_base 1: mod_base = OTHER; note = guanosine-3'-phosphate
  modified_base 2: mod_base = OTHER; note = cytidine-3'-phosphate
  modified_base 3: mod_base = OTHER; note = cytidine-3'-phosphate
  modified_base 4: mod_base = OTHER; note = guanosine-3'-phosphate
  modified_base 5: mod_base = OTHER; note = guanosine-3'-phosphate
  modified_base 6: mod_base = OTHER; note = cytidine-3'-phosphate
  modified_base 7: mod_base = OTHER; note = adenosine-3'-phosphate
  modified_base 8: mod_base = OTHER; note = uridine-3'-phosphate
  modified_base 9: mod_base = OTHER; note = cytidine-3'-phosphate
  modified_base 10: mod_base = OTHER; note = cytidine-3'-phosphate
  modified_base 11: mod_base = OTHER; note = cytidine-3'-phosphate
  modified_base 12: mod_base = OTHER; note = guanosine-3'-phosphate
  modified_base 13: mod_base = OTHER; note = guanosine-3'-phosphate
  modified_base 14: mod_base = OTHER; note = cytidine-3'-phosphate
  modified_base 15: mod_base = OTHER; note = cytidine-3'-phosphate
  modified_base 16: mod_base = OTHER; note = guanosine-3'-phosphate
  modified_base 17: mod_base = OTHER; note = cytidine-3'-phosphate
  modified_base 18: mod_base = OTHER; note = uridine-3'-phosphate
  modified_base 19: mod_base = OTHER; note = guanosine-3'-phosphate
  modified_base 20: mod_base = OTHER; note = 2'-deoxythymidine-3'-phosphorothioate
  misc_feature 1..19: note = RNA
  misc_feature 20..21: note = DNA
gccggcatcccggccgctgtt

SEQ ID NO: 405 - DNA, 21 bp, synthetic construct
  source 1..21: mol_type = other DNA
  modified_base 1: mod_base = OTHER; note = 2'-O-methylcytidine-3'-phosphate
  modified_base 2: mod_base = OTHER; note = adenosine-3'-phosphate
  modified_base 3: mod_base = OTHER; note = guanosine-3'-phosphate
  modified_base 4: mod_base = OTHER; note = 2'-O-methylcytidine-3'-phosphate
  modified_base 5: mod_base = OTHER; note = guanosine-3'-phosphate
  modified_base 6: mod_base = OTHER; note = guanosine-3'-phosphate
  modified_base 7: mod_base = OTHER; note = 2'-O-methylcytidine-3'-phosphate
  modified_base 8: mod_base = OTHER; note = 2'-O-methylcytidine-3'-phosphate
  modified_base 9: mod_base = OTHER; note = guanosine-3'-phosphate
  modified_base 10: mod_base = OTHER; note = guanosine-3'-phosphate
  modified_base 11: mod_base = OTHER; note = guanosine-3'-phosphate
  modified_base 12: mod_base = OTHER; note = adenosine-3'-phosphate
  modified_base 13: mod_base = OTHER; note = 2'-O-methyluridine-3'-phosphate
  modified_base 14: mod_base = OTHER; note = guanosine-3'-phosphate
  modified_base 15: mod_base = OTHER; note = 2'-O-methylcytidine-3'-phosphate
  modified_base 16: mod_base = OTHER; note = 2'-O-methylcytidine-3'-phosphate
  modified_base 17: mod_base = OTHER; note = guanosine-3'-phosphate
  modified_base 18: mod_base = OTHER; note = guanosine-3'-phosphate
  modified_base 19: mod_base = OTHER; note = 2'-O-methylcytidine-3'-phosphate
  modified_base 20: mod_base = OTHER; note = 2'-deoxythymidine-3'-phosphorothioate
  misc_feature 1..19: note = RNA
  misc_feature 20..21: note = DNA
cagcggccgggatgccggctt

SEQ ID NO: 406 - DNA, 21 bp, synthetic construct
  source 1..21: mol_type = other DNA
  modified_base 1: mod_base = OTHER; note = guanosine-3'-phosphate
  modified_base 2: mod_base = OTHER; note = cytidine-3'-phosphate
  modified_base 3: mod_base = OTHER; note = cytidine-3'-phosphate
  modified_base 4: mod_base = OTHER; note = guanosine-3'-phosphate
  modified_base 5: mod_base = OTHER; note = guanosine-3'-phosphate
  modified_base 6: mod_base = OTHER; note = 2'-O-methylcytidine-3'-phosphate
  modified_base 7: mod_base = OTHER; note = adenosine-3'-phosphate
  modified_base 8: mod_base = OTHER; note = uridine-3'-phosphate
  modified_base 9: mod_base = OTHER; note = cytidine-3'-phosphate
  modified_base 10: mod_base = OTHER; note = cytidine-3'-phosphate
  modified_base 11: mod_base = OTHER; note = cytidine-3'-phosphate
  modified_base 12: mod_base = OTHER; note = guanosine-3'-phosphate
  modified_base 13: mod_base = OTHER; note = guanosine-3'-phosphate
  modified_base 14: mod_base = OTHER; note = cytidine-3'-phosphate
  modified_base 15: mod_base = OTHER; note = cytidine-3'-phosphate
  modified_base 16: mod_base = OTHER; note = guanosine-3'-phosphate
  modified_base 17: mod_base = OTHER; note = cytidine-3'-phosphate
  modified_base 18: mod_base = OTHER; note = uridine-3'-phosphate
  modified_base 19: mod_base = OTHER; note = guanosine-3'-phosphate
  modified_base 20: mod_base = OTHER; note = 2'-deoxythymidine-3'-phosphorothioate
  misc_feature 1..19: note = RNA
  misc_feature 20..21: note = DNA
gccggcatcccggccgctgtt

SEQ ID NO: 407 - DNA, 21 bp, synthetic construct
  source 1..21: mol_type = other DNA
  modified_base 1: mod_base = OTHER; note = guanosine-3'-phosphate
  modified_base 2: mod_base = OTHER; note = guanosine-3'-phosphate
  modified_base 3: mod_base = OTHER; note = guanosine-3'-phosphate
  modified_base 4: mod_base = OTHER; note = uridine-3'-phosphate
  modified_base 5: mod_base = OTHER; note = guanosine-3'-phosphate
  modified_base 6: mod_base = OTHER; note = cytidine-3'-phosphate
  modified_base 7: mod_base = OTHER; note = cytidine-3'-phosphate
  modified_base 8: mod_base = OTHER; note = adenosine-3'-phosphate
  modified_base 9: mod_base = OTHER; note = guanosine-3'-phosphate
  modified_base 10: mod_base = OTHER; note = cytidine-3'-phosphate
  modified_base 11: mod_base = OTHER; note = adenosine-3'-phosphate
  modified_base 12: mod_base = OTHER; note = uridine-3'-phosphate
  modified_base 13: mod_base = OTHER; note = guanosine-3'-phosphate
  modified_base 14: mod_base = OTHER; note = cytidine-3'-phosphate
  modified_base 15: mod_base = OTHER; note = guanosine-3'-phosphate
  modified_base 16: mod_base = OTHER; note = cytidine-3'-phosphate
  modified_base 17: mod_base = OTHER; note = adenosine-3'-phosphate
  modified_base 18: mod_base = OTHER; note = guanosine-3'-phosphate
  modified_base 19: mod_base = OTHER; note = cytidine-3'-phosphate
  misc_feature 1..19: note = RNA
  misc_feature 20..21: note = DNA
gggtgccagcatgcgcagctt

SEQ ID NO: 408 - DNA, 21 bp, synthetic construct
  source 1..21: mol_type = other DNA
  modified_base 1: mod_base = OTHER; note = guanosine-3'-phosphate
  modified_base 2: mod_base = OTHER; note = cytidine-3'-phosphate
  modified_base 3: mod_base = OTHER; note = uridine-3'-phosphate
  modified_base 4: mod_base = OTHER; note = guanosine-3'-phosphate
  modified_base 5: mod_base = OTHER; note = cytidine-3'-phosphate
  modified_base 6: mod_base = OTHER; note = guanosine-3'-phosphate
  modified_base 7: mod_base = OTHER; note = cytidine-3'-phosphate
  modified_base 8: mod_base = OTHER; note = adenosine-3'-phosphate
  modified_base 9: mod_base = OTHER; note = uridine-3'-phosphate
  modified_base 10: mod_base = OTHER; note = guanosine-3'-phosphate
  modified_base 11: mod_base = OTHER; note = cytidine-3'-phosphate
  modified_base 12: mod_base = OTHER; note = uridine-3'-phosphate
  modified_base 13: mod_base = OTHER; note = guanosine-3'-phosphate
  modified_base 14: mod_base = OTHER; note = guanosine-3'-phosphate
  modified_base 15: mod_base = OTHER; note = cytidine-3'-phosphate
  modified_base 16: mod_base = OTHER; note = adenosine-3'-phosphate
  modified_base 17: mod_base = OTHER; note = cytidine-3'-phosphate
  modified_base 18: mod_base = OTHER; note = cytidine-3'-phosphate
  modified_base 19: mod_base = OTHER; note = cytidine-3'-phosphate
  misc_feature 1..19: note = RNA
  misc_feature 20..21: note = DNA
gctgcgcatgctggcaccctt

SEQ ID NO: 409 - DNA, 21 bp, synthetic construct
  source 1..21: mol_type = other DNA
  modified_base 1: mod_base = OTHER; note = cytidine-3'-phosphate
  modified_base 2: mod_base = OTHER; note = cytidine-3'-phosphate
  modified_base 3: mod_base = OTHER; note = uridine-3'-phosphate
  modified_base 4: mod_base = OTHER; note = guanosine-3'-phosphate
  modified_base 5: mod_base = OTHER; note = cytidine-3'-phosphate
  modified_base 6: mod_base = OTHER; note = guanosine-3'-phosphate
  modified_base 7: mod_base = OTHER; note = cytidine-3'-phosphate
  modified_base 8: mod_base = OTHER; note = guanosine-3'-phosphate
  modified_base 9: mod_base = OTHER; note = uridine-3'-phosphate
  modified_base 10: mod_base = OTHER; note = guanosine-3'-phosphate
  modified_base 11: mod_base = OTHER; note = cytidine-3'-phosphate
  modified_base 12: mod_base = OTHER; note = uridine-3'-phosphate
  modified_base 13: mod_base = OTHER; note = cytidine-3'-phosphate
  modified_base 14: mod_base = OTHER; note = adenosine-3'-phosphate
  modified_base 15: mod_base = OTHER; note = adenosine-3'-phosphate
  modified_base 16: mod_base = OTHER; note = cytidine-3'-phosphate
  modified_base 17: mod_base = OTHER; note = uridine-3'-phosphate
  modified_base 18: mod_base = OTHER; note = guanosine-3'-phosphate
  modified_base 19: mod_base = OTHER; note = cytidine-3'-phosphate
  modified_base 20: mod_base = OTHER; note = 2'-deoxythymidine-3'-phosphorothioate
  misc_feature 1..19: note = RNA
  misc_feature 20..21: note = DNA
cctgcgcgtgctcaactgctt

SEQ ID NO: 410 - DNA, 21 bp, synthetic construct
  source 1..21: mol_type = other DNA
  modified_base 1: mod_base = OTHER; note = guanosine-3'-phosphate
  modified_base 2: mod_base = OTHER; note = cytidine-3'-phosphate
  modified_base 3: mod_base = OTHER; note = adenosine-3'-phosphate
  modified_base 4: mod_base = OTHER; note = guanosine-3'-phosphate
  modified_base 5: mod_base = OTHER; note = uridine-3'-phosphate
  modified_base 6: mod_base = OTHER; note = uridine-3'-phosphate
  modified_base 7: mod_base = OTHER; note = guanosine-3'-phosphate
  modified_base 8: mod_base = OTHER; note = adenosine-3'-phosphate
  modified_base 9: mod_base = OTHER; note = guanosine-3'-phosphate
  modified_base 10: mod_base = OTHER; note = cytidine-3'-phosphate
  modified_base 11: mod_base = OTHER; note = adenosine-3'-phosphate
  modified_base 12: mod_base = OTHER; note = cytidine-3'-phosphate
  modified_base 13: mod_base = OTHER; note = guanosine-3'-phosphate
  modified_base 14: mod_base = OTHER; note = cytidine-3'-phosphate
  modified_base 15: mod_base = OTHER; note = guanosine-3'-phosphate
  modified_base 16: mod_base = OTHER; note = cytidine-3'-phosphate
  modified_base 17: mod_base = OTHER; note = adenosine-3'-phosphate
  modified_base 18: mod_base = OTHER; note = guanosine-3'-phosphate
  modified_base 19: mod_base = OTHER; note = guanosine-3'-phosphate
  modified_base 20: mod_base = OTHER; note = 2'-deoxythymidine-3'-phosphorothioate
  misc_feature 1..19: note = RNA
  misc_feature 20..21: note = DNA
gcagttgagcacgcgcaggtt

SEQ ID NO: 411 - DNA, 21 bp, synthetic construct
  source 1..21: mol_type = other DNA
  modified_base 1: mod_base = OTHER; note = 2'-O-methylcytidine-3'-phosphate
  modified_base 2: mod_base = OTHER; note = 2'-O-methylcytidine-3'-phosphate
  modified_base 3: mod_base = OTHER; note = 2'-O-methyluridine-3'-phosphate
  modified_base 4: mod_base = OTHER; note = guanosine-3'-phosphate
  modified_base 5: mod_base = OTHER; note = 2'-O-methylcytidine-3'-phosphate
  modified_base 6: mod_base = OTHER; note = guanosine-3'-phosphate
  modified_base 7: mod_base = OTHER; note = 2'-O-methylcytidine-3'-phosphate
  modified_base 8: mod_base = OTHER; note = guanosine-3'-phosphate
  modified_base 9: mod_base = OTHER; note = 2'-O-methyluridine-3'-phosphate
  modified_base 10: mod_base = OTHER; note = guanosine-3'-phosphate
  modified_base 11: mod_base = OTHER; note = 2'-O-methylcytidine-3'-phosphate
  modified_base 12: mod_base = OTHER; note = 2'-O-methyluridine-3'-phosphate
  modified_base 13: mod_base = OTHER; note = 2'-O-methylcytidine-3'-phosphate
  modified_base 14: mod_base = OTHER; note = adenosine-3'-phosphate
  modified_base 15: mod_base = OTHER; note = adenosine-3'-phosphate
  modified_base 16: mod_base = OTHER; note = 2'-O-methylcytidine-3'-phosphate
  modified_base 17: mod_base = OTHER; note = 2'-O-methyluridine-3'-phosphate
  modified_base 18: mod_base = OTHER; note = guanosine-3'-phosphate
  modified_base 19: mod_base = OTHER; note = 2'-O-methylcytidine-3'-phosphate
  modified_base 20: mod_base = OTHER; note = 2'-deoxythymidine-3'-phosphorothioate
  misc_feature 1..19: note = RNA
  misc_feature 20..21: note = DNA
cctgcgcgtgctcaactgctt

SEQ ID NO: 412 - DNA, 21 bp, synthetic construct
  source 1..21: mol_type = other DNA
  modified_base 1: mod_base = OTHER; note = guanosine-3'-phosphate
  modified_base 2: mod_base = OTHER; note = 2'-O-methylcytidine-3'-phosphate
  modified_base 3: mod_base = OTHER; note = adenosine-3'-phosphate
  modified_base 4: mod_base = OTHER; note = guanosine-3'-phosphate
  modified_base 5: mod_base = OTHER; note = uridine-3'-phosphate
  modified_base 6: mod_base = OTHER; note = uridine-3'-phosphate
  modified_base 7: mod_base = OTHER; note = guanosine-3'-phosphate
  modified_base 8: mod_base = OTHER; note = adenosine-3'-phosphate
  modified_base 9: mod_base = OTHER; note = guanosine-3'-phosphate
  modified_base 10: mod_base = OTHER; note = 2'-O-methylcytidine-3'-phosphate
  modified_base 11: mod_base = OTHER; note = adenosine-3'-phosphate
  modified_base 12: mod_base = OTHER; note = cytidine-3'-phosphate
  modified_base 13: mod_base = OTHER; note = guanosine-3'-phosphate
  modified_base 14: mod_base = OTHER; note = cytidine-3'-phosphate
  modified_base 15: mod_base = OTHER; note = guanosine-3'-phosphate
  modified_base 16: mod_base = OTHER; note = 2'-O-methylcytidine-3'-phosphate
  modified_base 17: mod_base = OTHER; note = adenosine-3'-phosphate
  modified_base 18: mod_base = OTHER; note = guanosine-3'-phosphate
  modified_base 19: mod_base = OTHER; note = guanosine-3'-phosphate
  modified_base 20: mod_base = OTHER; note = 2'-deoxythymidine-3'-phosphorothioate
  misc_feature 1..19: note = RNA
  misc_feature 20..21: note = DNA
gcagttgagcacgcgcaggtt

SEQ ID NO: 413 - DNA, 21 bp, synthetic construct
  source 1..21: mol_type = other DNA
  modified_base 1: mod_base = OTHER; note = uridine-3'-phosphate
  modified_base 2: mod_base = OTHER; note = guanosine-3'-phosphate
  modified_base 3: mod_base = OTHER; note = cytidine-3'-phosphate
  modified_base 4: mod_base = OTHER; note = guanosine-3'-phosphate
  modified_base 5: mod_base = OTHER; note = cytidine-3'-phosphate
  modified_base 6: mod_base = OTHER; note = guanosine-3'-phosphate
  modified_base 7: mod_base = OTHER; note = uridine-3'-phosphate
  modified_base 8: mod_base = OTHER; note = guanosine-3'-phosphate
  modified_base 9: mod_base = OTHER; note = cytidine-3'-phosphate
  modified_base 10: mod_base = OTHER; note = uridine-3'-phosphate
  modified_base 11: mod_base = OTHER; note = cytidine-3'-phosphate
  modified_base 12: mod_base = OTHER; note = adenosine-3'-phosphate
  modified_base 13: mod_base = OTHER; note = adenosine-3'-phosphate
  modified_base 14: mod_base = OTHER; note = cytidine-3'-phosphate
  modified_base 15: mod_base = OTHER; note = uridine-3'-phosphate
  modified_base 16: mod_base = OTHER; note = guanosine-3'-phosphate
  modified_base 17: mod_base = OTHER; note = cytidine-3'-phosphate
  modified_base 18: mod_base = OTHER; note = cytidine-3'-phosphate
  modified_base 19: mod_base = OTHER; note = adenosine-3'-phosphate
  modified_base 20: mod_base = OTHER; note = 2'-deoxythymidine-3'-phosphorothioate
  misc_feature 1..19: note = RNA
  misc_feature 20..21: note = DNA
tgcgcgtgctcaactgccatt

SEQ ID NO: 414 - DNA, 21 bp, synthetic construct
  source 1..21: mol_type = other DNA
  modified_base 1: mod_base = OTHER; note = uridine-3'-phosphate
  modified_base 2: mod_base = OTHER; note = guanosine-3'-phosphate
  modified_base 3: mod_base = OTHER; note = guanosine-3'-phosphate
  modified_base 4: mod_base = OTHER; note = cytidine-3'-phosphate
  modified_base 5: mod_base = OTHER; note = adenosine-3'-phosphate
  modified_base 6: mod_base = OTHER; note = guanosine-3'-phosphate
  modified_base 7: mod_base = OTHER; note = uridine-3'-phosphate
  modified_base 8: mod_base = OTHER; note = uridine-3'-phosphate
  modified_base 9: mod_base = OTHER; note = guanosine-3'-phosphate
  modified_base 10: mod_base = OTHER; note = adenosine-3'-phosphate
  modified_base 11: mod_base = OTHER; note = guanosine-3'-phosphate
  modified_base 12: mod_base = OTHER; note = cytidine-3'-phosphate
  modified_base 13: mod_base = OTHER; note = adenosine-3'-phosphate
  modified_base 14: mod_base = OTHER; note = cytidine-3'-phosphate
  modified_base 15: mod_base = OTHER; note = guanosine-3'-phosphate
  modified_base 16: mod_base = OTHER; note = cytidine-3'-phosphate
  modified_base 17: mod_base = OTHER; note = guanosine-3'-phosphate
  modified_base 18: mod_base = OTHER; note = cytidine-3'-phosphate
  modified_base 19: mod_base = OTHER; note = adenosine-3'-phosphate
  modified_base 20: mod_base = OTHER; note = 2'-deoxythymidine-3'-phosphorothioate
  misc_feature 1..19: note = RNA
  misc_feature 20..21: note = DNA
tggcagttgagcacgcgcatt

SEQ ID NO: 415 - DNA, 21 bp, synthetic construct
  source 1..21: mol_type = other DNA
  modified_base 1: mod_base = OTHER; note = 2'-O-methyluridine-3'-phosphate
  modified_base 2: mod_base = OTHER; note = guanosine-3'-phosphate
  modified_base 3: mod_base = OTHER; note = 2'-O-methylcytidine-3'-phosphate
  modified_base 4: mod_base = OTHER; note = guanosine-3'-phosphate
  modified_base 5: mod_base = OTHER; note = 2'-O-methylcytidine-3'-phosphate
  modified_base 6: mod_base = OTHER; note = guanosine-3'-phosphate
  modified_base 7: mod_base = OTHER; note = 2'-O-methyluridine-3'-phosphate
  modified_base 8: mod_base = OTHER; note = guanosine-3'-phosphate
  modified_base 9: mod_base = OTHER; note = 2'-O-methylcytidine-3'-phosphate
  modified_base 10: mod_base = OTHER; note = 2'-O-methyluridine-3'-phosphate
  modified_base 11: mod_base = OTHER; note = 2'-O-methylcytidine-3'-phosphate
  modified_base 12: mod_base = OTHER; note = adenosine-3'-phosphate
  modified_base 13: mod_base = OTHER; note = adenosine-3'-phosphate
  modified_base 14: mod_base = OTHER; note = 2'-O-methylcytidine-3'-phosphate
  modified_base 15: mod_base = OTHER; note = 2'-O-methyluridine-3'-phosphate
  modified_base 16: mod_base = OTHER; note = guanosine-3'-phosphate
  modified_base 17: mod_base = OTHER; note = 2'-O-methylcytidine-3'-phosphate
  modified_base 18: mod_base = OTHER; note = 2'-O-methylcytidine-3'-phosphate
  modified_base 19: mod_base = OTHER; note = adenosine-3'-phosphate
  modified_base 20: mod_base = OTHER; note = 2'-deoxythymidine-3'-phosphorothioate
  misc_feature 1..19: note = RNA
  misc_feature 20..21: note = DNA
tgcgcgtgctcaactgccatt

SEQ ID NO: 416 - DNA, 21 bp, synthetic construct
  source 1..21: mol_type = other DNA
  modified_base 1: mod_base = OTHER; note = uridine-3'-phosphate
  modified_base 2: mod_base = OTHER; note = guanosine-3'-phosphate
  modified_base 3: mod_base = OTHER; note = guanosine-3'-phosphate
  modified_base 4: mod_base = OTHER; note = 2'-O-methylcytidine-3'-phosphate
  modified_base 5: mod_base = OTHER; note = adenosine-3'-phosphate
  modified_base 6: mod_base = OTHER; note = guanosine-3'-phosphate
  modified_base 7: mod_base = OTHER; note = uridine-3'-phosphate
  modified_base 8: mod_base = OTHER; note = uridine-3'-phosphate
  modified_base 9: mod_base = OTHER; note = guanosine-3'-phosphate
  modified_base 10: mod_base = OTHER; note = adenosine-3'-phosphate
  modified_base 11: mod_base = OTHER; note = guanosine-3'-phosphate
  modified_base 12: mod_base = OTHER; note = 2'-O-methylcytidine-3'-phosphate
  modified_base 13: mod_base = OTHER; note = adenosine-3'-phosphate
  modified_base 14: mod_base = OTHER; note = cytidine-3'-phosphate
  modified_base 15: mod_base = OTHER; note = guanosine-3'-phosphate
  modified_base 16: mod_base = OTHER; note = cytidine-3'-phosphate
  modified_base 17: mod_base = OTHER; note = guanosine-3'-phosphate
  modified_base 18: mod_base = OTHER; note = 2'-O-methylcytidine-3'-phosphate
  modified_base 19: mod_base = OTHER; note = adenosine-3'-phosphate
  modified_base 20: mod_base = OTHER; note = 2'-deoxythymidine-3'-phosphorothioate
  misc_feature 1..19: note = RNA
  misc_feature 20..21: note = DNA
tggcagttgagcacgcgcatt

SEQ ID NO: 417 - DNA, 21 bp, synthetic construct
  source 1..21: mol_type = other DNA
  modified_base 1: mod_base = OTHER; note = cytidine-3'-phosphate
  modified_base 2: mod_base = OTHER; note = guanosine-3'-phosphate
  modified_base 3: mod_base = OTHER; note = cytidine-3'-phosphate
  modified_base 4: mod_base = OTHER; note = guanosine-3'-phosphate
  modified_base 5: mod_base = OTHER; note = uridine-3'-phosphate
  modified_base 6: mod_base = OTHER; note = guanosine-3'-phosphate
  modified_base 7: mod_base = OTHER; note = cytidine-3'-phosphate
  modified_base 8: mod_base = OTHER; note = uridine-3'-phosphate
  modified_base 9: mod_base = OTHER; note = cytidine-3'-phosphate
  modified_base 10: mod_base = OTHER; note = adenosine-3'-phosphate
  modified_base 11: mod_base = OTHER; note = adenosine-3'-phosphate
  modified_base 12: mod_base = OTHER; note = cytidine-3'-phosphate
  modified_base 13: mod_base = OTHER; note = uridine-3'-phosphate
  modified_base 14: mod_base = OTHER; note = guanosine-3'-phosphate
  modified_base 15: mod_base = OTHER; note = cytidine-3'-phosphate
  modified_base 16: mod_base = OTHER; note = cytidine-3'-phosphate
  modified_base 17: mod_base = OTHER; note = adenosine-3'-phosphate
  modified_base 18: mod_base = OTHER; note = adenosine-3'-phosphate
  modified_base 19: mod_base = OTHER; note = guanosine-3'-phosphate
  modified_base 20: mod_base = OTHER; note = 2'-deoxythymidine-3'-phosphorothioate
  misc_feature 1..19: note = RNA
  misc_feature 20..21: note = DNA
cgcgtgctcaactgccaagtt

SEQ ID NO: 418 - DNA, 21 bp, synthetic construct
  source 1..21: mol_type = other DNA
  modified_base 1: mod_base = OTHER; note = cytidine-3'-phosphate
  modified_base 2: mod_base = OTHER; note = uridine-3'-phosphate
  modified_base 3: mod_base = OTHER; note = uridine-3'-phosphate
  modified_base 4: mod_base = OTHER; note = guanosine-3'-phosphate
  modified_base 5: mod_base = OTHER; note = guanosine-3'-phosphate
  modified_base 6: mod_base = OTHER; note = cytidine-3'-phosphate
  modified_base 7: mod_base = OTHER; note = adenosine-3'-phosphate
  modified_base 8: mod_base = OTHER; note = guanosine-3'-phosphate
  modified_base 9: mod_base = OTHER; note = uridine-3'-phosphate
  modified_base 10: mod_base = OTHER; note = uridine-3'-phosphate
  modified_base 11: mod_base = OTHER; note = guanosine-3'-phosphate
  modified_base 12: mod_base = OTHER; note = adenosine-3'-phosphate
  modified_base 13: mod_base = OTHER; note = guanosine-3'-phosphate
  modified_base 14: mod_base = OTHER; note = cytidine-3'-phosphate
  modified_base 15: mod_base = OTHER; note = adenosine-3'-phosphate
  modified_base 16: mod_base = OTHER; note = cytidine-3'-phosphate
  modified_base 17: mod_base = OTHER; note = guanosine-3'-phosphate
  modified_base 18: mod_base = OTHER; note = cytidine-3'-phosphate
  modified_base 19: mod_base = OTHER; note = guanosine-3'-phosphate
  modified_base 20: mod_base = OTHER; note = 2'-deoxythymidine-3'-phosphorothioate
  misc_feature 1..19: note = RNA
  misc_feature 20..21: note = DNA
cttggcagttgagcacgcgtt

SEQ ID NO: 419 - DNA, 21 bp, synthetic construct
  source 1..21: mol_type = other DNA
  modified_base 1: mod_base = OTHER; note = 2'-O-methylcytidine-3'-phosphate
  modified_base 2: mod_base = OTHER; note = guanosine-3'-phosphate
  modified_base 3: mod_base = OTHER; note = 2'-O-methylcytidine-3'-phosphate
  modified_base 4: mod_base = OTHER; note = guanosine-3'-phosphate
  modified_base 5: mod_base = OTHER; note = 2'-O-methyluridine-3'-phosphate
  modified_base 6: mod_base = OTHER; note = guanosine-3'-phosphate
  modified_base 7: mod_base = OTHER; note = 2'-O-methylcytidine-3'-phosphate
  modified_base 8: mod_base = OTHER; note = 2'-O-methyluridine-3'-phosphate
  modified_base 9: mod_base = OTHER; note = 2'-O-methylcytidine-3'-phosphate
  modified_base 10: mod_base = OTHER; note = adenosine-3'-phosphate
  modified_base 11: mod_base = OTHER; note = adenosine-3'-phosphate
  modified_base 12: mod_base = OTHER; note = 2'-O-methylcytidine-3'-phosphate
  modified_base 13: mod_base = OTHER; note = 2'-O-methyluridine-3'-phosphate
  modified_base 14: mod_base = OTHER; note = guanosine-3'-phosphate
  modified_base 15: mod_base = OTHER; note = 2'-O-methylcytidine-3'-phosphate
  modified_base 16: mod_base = OTHER; note = 2'-O-methylcytidine-3'-phosphate
  modified_base 17: mod_base = OTHER; note = adenosine-3'-phosphate
  modified_base 18: mod_base = OTHER; note = adenosine-3'-phosphate
  modified_base 19: mod_base = OTHER; note = guanosine-3'-phosphate
  modified_base 20: mod_base = OTHER; note = 2'-deoxythymidine-3'-phosphorothioate
  misc_feature 1..19: note = RNA
  misc_feature 20..21: note = DNA
cgcgtgctcaactgccaagtt

SEQ ID NO: 420 - DNA, 21 bp, synthetic construct
  source 1..21: mol_type = other DNA
  modified_base 1: mod_base = OTHER; note = cytidine-3'-phosphate
  modified_base 2: mod_base = OTHER; note = uridine-3'-phosphate
  modified_base 3: mod_base = OTHER; note = uridine-3'-phosphate
  modified_base 4: mod_base = OTHER; note = guanosine-3'-phosphate
  modified_base 5: mod_base = OTHER; note = guanosine-3'-phosphate
  modified_base 6: mod_base = OTHER; note = 2'-O-methylcytidine-3'-phosphate
  modified_base 7: mod_base = OTHER; note = adenosine-3'-phosphate
  modified_base 8: mod_base = OTHER; note = guanosine-3'-phosphate
  modified_base 9: mod_base = OTHER; note = uridine-3'-phosphate
  modified_base 10: mod_base = OTHER; note = uridine-3'-phosphate
  modified_base 11: mod_base = OTHER; note = guanosine-3'-phosphate
  modified_base 12: mod_base = OTHER; note = adenosine-3'-phosphate
  modified_base 13: mod_base = OTHER; note = guanosine-3'-phosphate
  modified_base 14: mod_base = OTHER; note = 2'-O-methylcytidine-3'-phosphate
  modified_base 15: mod_base = OTHER; note = adenosine-3'-phosphate
  modified_base 16: mod_base = OTHER; note = cytidine-3'-phosphate
  modified_base 17: mod_base = OTHER; note = guanosine-3'-phosphate
  modified_base 18: mod_base = OTHER; note = cytidine-3'-phosphate
  modified_base 19: mod_base = OTHER; note = guanosine-3'-phosphate
  modified_base 20: mod_base = OTHER; note = 2'-deoxythymidine-3'-phosphorothioate
  misc_feature 1..19: note = RNA
  misc_feature 20..21: note = DNA
cttggcagttgagcacgcgtt

SEQ ID NO: 421 - DNA, 21 bp, synthetic construct
  source 1..21: mol_type = other DNA
  modified_base 1: mod_base = OTHER; note = cytidine-3'-phosphate
  modified_base 2: mod_base = OTHER; note = uridine-3'-phosphate
  modified_base 3: mod_base = OTHER; note = guanosine-3'-phosphate
  modified_base 4: mod_base = OTHER; note = cytidine-3'-phosphate
  modified_base 5: mod_base = OTHER; note = cytidine-3'-phosphate
  modified_base 6: mod_base = OTHER; note = adenosine-3'-phosphate
  modified_base 7: mod_base = OTHER; note = adenosine-3'-phosphate
  modified_base 8: mod_base = OTHER; note = guanosine-3'-phosphate
  modified_base 9: mod_base = OTHER; note = guanosine-3'-phosphate
  modified_base 10: mod_base = OTHER; note = guanosine-3'-phosphate
  modified_base 11: mod_base = OTHER; note = adenosine-3'-phosphate
  modified_base 12: mod_base = OTHER; note = adenosine-3'-phosphate
  modified_base 13: mod_base = OTHER; note = guanosine-3'-phosphate
  modified_base 14: mod_base = OTHER; note = guanosine-3'-phosphate
  modified_base 15: mod_base = OTHER; note = guanosine-3'-phosphate
  modified_base 16: mod_base = OTHER; note = cytidine-3'-phosphate
  modified_base 17: mod_base = OTHER; note = adenosine-3'-phosphate
  modified_base 18: mod_base = OTHER; note = cytidine-3'-phosphate
  modified_base 19: mod_base = OTHER; note = guanosine-3'-phosphate
  modified_base 20: mod_base = OTHER; note = 2'-deoxythymidine-3'-phosphorothioate
  misc_feature 1..19: note = RNA
  misc_feature 20..21: note = DNA
ctgccaagggaagggcacgtt

SEQ ID NO: 422 - DNA, 21 bp, synthetic construct
  source 1..21: mol_type = other DNA
  modified_base 1: mod_base = OTHER; note = cytidine-3'-phosphate
  modified_base 2: mod_base = OTHER; note = guanosine-3'-phosphate
  modified_base 3: mod_base = OTHER; note = uridine-3'-phosphate
  modified_base 4: mod_base = OTHER; note = guanosine-3'-phosphate
  modified_base 5: mod_base = OTHER; note = cytidine-3'-phosphate
  modified_base 6: mod_base = OTHER; note = cytidine-3'-phosphate
  modified_base 7: mod_base = OTHER; note = cytidine-3'-phosphate
  modified_base 8: mod_base = OTHER; note = uridine-3'-phosphate
  modified_base 9: mod_base = OTHER; note = uridine-3'-phosphate
  modified_base 10: mod_base = OTHER; note = cytidine-3'-phosphate
  modified_base 11: mod_base = OTHER; note = cytidine-3'-phosphate
  modified_base 12: mod_base = OTHER; note = cytidine-3'-phosphate
  modified_base 13: mod_base = OTHER; note = uridine-3'-phosphate
  modified_base 14: mod_base = OTHER; note = uridine-3'-phosphate
  modified_base 15: mod_base = OTHER; note = guanosine-3'-phosphate
  modified_base 16: mod_base = OTHER; note = guanosine-3'-phosphate
  modified_base 17: mod_base = OTHER; note = cytidine-3'-phosphate
  modified_base 18: mod_base = OTHER; note = adenosine-3'-phosphate
  modified_base 19: mod_base = OTHER; note = guanosine-3'-phosphate
  modified_base 20: mod_base = OTHER; note = 2'-deoxythymidine-3'-phosphorothioate
  misc_feature 1..19: note = RNA
  misc_feature 20..21: note = DNA
cgtgcccttcccttggcagtt

SEQ ID NO: 423 - DNA, 21 bp, synthetic construct
  source 1..21: mol_type = other DNA
  modified_base 1: mod_base = OTHER; note = 2'-O-methylcytidine-3'-phosphate
  modified_base 2: mod_base = OTHER; note = 2'-O-methyluridine-3'-phosphate
  modified_base 3: mod_base = OTHER; note = guanosine-3'-phosphate
  modified_base 4: mod_base = OTHER; note = 2'-O-methylcytidine-3'-phosphate
  modified_base 5: mod_base = OTHER; note = 2'-O-methylcytidine-3'-phosphate
  modified_base 6: mod_base = OTHER; note = adenosine-3'-phosphate
  modified_base 7: mod_base = OTHER; note = adenosine-3'-phosphate
  modified_base 8: mod_base = OTHER; note = guanosine-3'-phosphate
  modified_base 9: mod_base = OTHER; note = guanosine-3'-phosphate
  modified_base 10: mod_base = OTHER; note = guanosine-3'-phosphate
  modified_base 11: mod_base = OTHER; note = adenosine-3'-phosphate
  modified_base 12: mod_base = OTHER; note = adenosine-3'-phosphate
  modified_base 13: mod_base = OTHER; note = guanosine-3'-phosphate
  modified_base 14: mod_base = OTHER; note = guanosine-3'-phosphate
  modified_base 15: mod_base = OTHER; note = guanosine-3'-phosphate
  modified_base 16: mod_base = OTHER; note = 2'-O-methylcytidine-3'-phosphate
  modified_base 17: mod_base = OTHER; note = adenosine-3'-phosphate
  modified_base 18: mod_base = OTHER; note = 2'-O-methylcytidine-3'-phosphate
  modified_base 19: mod_base = OTHER; note = guanosine-3'-phosphate
  modified_base 20: mod_base = OTHER; note = 2'-deoxythymidine-3'-phosphorothioate
  misc_feature 1..19: note = RNA
  misc_feature 20..21: note = DNA
ctgccaagggaagggcacgtt

SEQ ID NO: 424 - DNA, 21 bp, synthetic construct
  source 1..21: mol_type = other DNA
  modified_base 1: mod_base = OTHER; note = cytidine-3'-phosphate
  modified_base 2: mod_base = OTHER; note = guanosine-3'-phosphate
  modified_base 3: mod_base = OTHER; note = uridine-3'-phosphate
  modified_base 4: mod_base = OTHER; note = guanosine-3'-phosphate
  modified_base 5: mod_base = OTHER; note = cytidine-3'-phosphate
  modified_base 6: mod_base = OTHER; note = cytidine-3'-phosphate
  modified_base 7: mod_base = OTHER; note = cytidine-3'-phosphate
  modified_base 8: mod_base = OTHER; note = uridine-3'-phosphate
  modified_base 9: mod_base = OTHER; note = uridine-3'-phosphate
  modified_base 10: mod_base = OTHER; note = cytidine-3'-phosphate
  modified_base 11: mod_base = OTHER; note = cytidine-3'-phosphate
  modified_base 12: mod_base = OTHER; note = cytidine-3'-phosphate
  modified_base 13: mod_base = OTHER; note = uridine-3'-phosphate
  modified_base 14: mod_base = OTHER; note = uridine-3'-phosphate
  modified_base 15: mod_base = OTHER; note = guanosine-3'-phosphate
  modified_base 16: mod_base = OTHER; note = guanosine-3'-phosphate
  modified_base 17: mod_base = OTHER; note = 2'-O-methylcytidine-3'-phosphate
  modified_base 18: mod_base = OTHER; note = adenosine-3'-phosphate
  modified_base 19: mod_base = OTHER; note = guanosine-3'-phosphate
  modified_base 20: mod_base = OTHER; note = 2'-deoxythymidine-3'-phosphorothioate
  misc_feature 1..19: note = RNA
  misc_feature 20..21: note = DNA
cgtgcccttcccttggcagtt

SEQ ID NO: 425 - DNA, 21 bp, synthetic construct
  source 1..21: mol_type = other DNA
  modified_base 1: mod_base = OTHER; note = cytidine-3'-phosphate
  modified_base 2: mod_base = OTHER; note = adenosine-3'-phosphate
  modified_base 3: mod_base = OTHER; note = adenosine-3'-phosphate
  modified_base 4: mod_base = OTHER; note = guanosine-3'-phosphate
  modified_base 5: mod_base = OTHER; note = guanosine-3'-phosphate
  modified_base 6: mod_base = OTHER; note = guanosine-3'-phosphate
  modified_base 7: mod_base = OTHER; note = adenosine-3'-phosphate
  modified_base 8: mod_base = OTHER; note = adenosine-3'-phosphate
  modified_base 9: mod_base = OTHER; note = guanosine-3'-phosphate
  modified_base 10: mod_base = OTHER; note = guanosine-3'-phosphate
  modified_base 11: mod_base = OTHER; note = guanosine-3'-phosphate
  modified_base 12: mod_base = OTHER; note = cytidine-3'-phosphate
  modified_base 13: mod_base = OTHER; note = adenosine-3'-phosphate
  modified_base 14: mod_base = OTHER; note = cytidine-3'-phosphate
  modified_base 15: mod_base = OTHER; note = guanosine-3'-phosphate
  modified_base 16: mod_base = OTHER; note = guanosine-3'-phosphate
  modified_base 17: mod_base = OTHER; note = uridine-3'-phosphate
  modified_base 18: mod_base = OTHER; note = uridine-3'-phosphate
  modified_base 19: mod_base = OTHER; note = adenosine-3'-phosphate
  misc_feature 1..19: note = RNA
  misc_feature 20..21: note = DNA
caagggaagggcacggttatt

SEQ ID NO: 426 - DNA, 21 bp, synthetic construct
  source 1..21: mol_type = other DNA
  modified_base 1: mod_base = OTHER; note = uridine-3'-phosphate
  modified_base 2: mod_base = OTHER; note = adenosine-3'-phosphate
  modified_base 3: mod_base = OTHER; note = adenosine-3'-phosphate
  modified_base 4: mod_base = OTHER; note = cytidine-3'-phosphate
  modified_base 5: mod_base = OTHER; note = cytidine-3'-phosphate
  modified_base 6: mod_base = OTHER; note = guanosine-3'-phosphate
  modified_base 7: mod_base = OTHER; note = uridine-3'-phosphate
  modified_base 8: mod_base = OTHER; note = guanosine-3'-phosphate
  modified_base 9: mod_base = OTHER; note = cytidine-3'-phosphate
  modified_base 10: mod_base = OTHER; note = cytidine-3'-phosphate
  modified_base 11: mod_base = OTHER; note = cytidine-3'-phosphate
  modified_base 12: mod_base = OTHER; note = uridine-3'-phosphate
  modified_base 13: mod_base = OTHER; note = uridine-3'-phosphate
  modified_base 14: mod_base = OTHER; note = cytidine-3'-phosphate
  modified_base 15: mod_base = OTHER; note = cytidine-3'-phosphate
  modified_base 16: mod_base = OTHER; note = cytidine-3'-phosphate
  modified_base 17: mod_base = OTHER; note = uridine-3'-phosphate
  modified_base 18: mod_base = OTHER; note = uridine-3'-phosphate
  modified_base 19: mod_base = OTHER; note = guanosine-3'-phosphate
  misc_feature 1..19: note = RNA
  misc_feature 20..21: note = DNA
taaccgtgcccttcccttgtt

SEQ ID NO: 427 - DNA, 21 bp, synthetic construct
  source 1..21: mol_type = other DNA
  modified_base 1: mod_base = OTHER; note = adenosine-3'-phosphate
  modified_base 2: mod_base = OTHER; note = adenosine-3'-phosphate
  modified_base 3: mod_base = OTHER; note = guanosine-3'-phosphate
  modified_base 4: mod_base = OTHER; note = guanosine-3'-phosphate
  modified_base 5: mod_base = OTHER; note = guanosine-3'-phosphate
  modified_base 6: mod_base = OTHER; note = adenosine-3'-phosphate
  modified_base 7: mod_base = OTHER; note = adenosine-3'-phosphate
  modified_base 8: mod_base = OTHER; note = guanosine-3'-phosphate
  modified_base 9: mod_base = OTHER; note = guanosine-3'-phosphate
  modified_base 10: mod_base = OTHER; note = guanosine-3'-phosphate
  modified_base 11: mod_base = OTHER; note = cytidine-3'-phosphate
  modified_base 12: mod_base = OTHER; note = adenosine-3'-phosphate
  modified_base 13: mod_base = OTHER; note = cytidine-3'-phosphate
  modified_base 14: mod_base = OTHER; note = guanosine-3'-phosphate
  modified_base 15: mod_base = OTHER; note = guanosine-3'-phosphate
  modified_base 16: mod_base = OTHER; note = uridine-3'-phosphate
  modified_base 17: mod_base = OTHER; note = uridine-3'-phosphate
  modified_base 18: mod_base = OTHER; note = adenosine-3'-phosphate
  modified_base 19: mod_base = OTHER; note = guanosine-3'-phosphate
  misc_feature 1..19: note = RNA
  misc_feature 20..21: note = DNA
aagggaagggcacggttagtt

SEQ ID NO: 428 - DNA, 21 bp, synthetic construct
  source 1..21: mol_type = other DNA
  modified_base 1: mod_base = OTHER; note = cytidine-3'-phosphate
  modified_base 2: mod_base = OTHER; note = uridine-3'-phosphate
  modified_base 3: mod_base = OTHER; note = adenosine-3'-phosphate
  modified_base 4: mod_base = OTHER; note = adenosine-3'-phosphate
  modified_base 5: mod_base = OTHER; note = cytidine-3'-phosphate
  modified_base 6: mod_base = OTHER; note = cytidine-3'-phosphate
  modified_base 7: mod_base = OTHER; note = guanosine-3'-phosphate
  modified_base 8: mod_base = OTHER; note = uridine-3'-phosphate
  modified_base 9: mod_base = OTHER; note = guanosine-3'-phosphate
  modified_base 10: mod_base = OTHER; note = cytidine-3'-phosphate
  modified_base 11: mod_base = OTHER; note = cytidine-3'-phosphate
  modified_base 12: mod_base = OTHER; note = cytidine-3'-phosphate
  modified_base 13: mod_base = OTHER; note = uridine-3'-phosphate
  modified_base 14: mod_base = OTHER; note = uridine-3'-phosphate
  modified_base 15: mod_base = OTHER; note = cytidine-3'-phosphate
  modified_base 16: mod_base = OTHER; note = cytidine-3'-phosphate
  modified_base 17: mod_base = OTHER; note = cytidine-3'-phosphate
  modified_base 18: mod_base = OTHER; note = uridine-3'-phosphate
  modified_base 19: mod_base = OTHER; note = uridine-3'-phosphate
  misc_feature 1..19: note = RNA
  misc_feature 20..21: note = DNA
ctaaccgtgcccttccctttt

SEQ ID NO: 429 - DNA, 21 bp, synthetic construct
  source 1..21: mol_type = other DNA
  modified_base 1: mod_base = OTHER; note = adenosine-3'-phosphate
  modified_base 2: mod_base = OTHER; note = guanosine-3'-phosphate
  modified_base 3: mod_base = OTHER; note = guanosine-3'-phosphate
  modified_base 4: mod_base = OTHER; note = guanosine-3'-phosphate
  modified_base 5: mod_base = OTHER; note = adenosine-3'-phosphate
  modified_base 6: mod_base = OTHER; note = adenosine-3'-phosphate
  modified_base 7: mod_base = OTHER; note = guanosine-3'-phosphate
  modified_base 8: mod_base = OTHER; note = guanosine-3'-phosphate
  modified_base 9: mod_base = OTHER; note = guanosine-3'-phosphate
  modified_base 10: mod_base = OTHER; note = cytidine-3'-phosphate
  modified_base 11: mod_base = OTHER; note = adenosine-3'-phosphate
  modified_base 12: mod_base = OTHER; note = cytidine-3'-phosphate
  modified_base 13: mod_base = OTHER; note = guanosine-3'-phosphate
  modified_base 14: mod_base = OTHER; note = guanosine-3'-phosphate
  modified_base 15: mod_base = OTHER; note = uridine-3'-phosphate
  modified_base 16: mod_base = OTHER; note = uridine-3'-phosphate
  modified_base 17: mod_base = OTHER; note = adenosine-3'-phosphate
  modified_base 18: mod_base = OTHER; note = guanosine-3'-phosphate
  modified_base 19: mod_base = OTHER; note = cytidine-3'-phosphate
  misc_feature 1..19: note = RNA
  misc_feature 20..21: note = DNA
agggaagggcacggttagctt

SEQ ID NO: 430 - DNA, 21 bp, synthetic construct
  source 1..21: mol_type = other DNA
  modified_base 1: mod_base = OTHER; note = guanosine-3'-phosphate
  modified_base 2: mod_base = OTHER; note = cytidine-3'-phosphate
  modified_base 3: mod_base = OTHER; note = uridine-3'-phosphate
  modified_base 4: mod_base = OTHER; note = adenosine-3'-phosphate
  modified_base 5: mod_base = OTHER; note = adenosine-3'-phosphate
  modified_base 6: mod_base = OTHER; note = cytidine-3'-phosphate
  modified_base 7: mod_base = OTHER; note = cytidine-3'-phosphate
  modified_base 8: mod_base = OTHER; note = guanosine-3'-phosphate
  modified_base 9: mod_base = OTHER; note = uridine-3'-phosphate
  modified_base 10: mod_base = OTHER; note = guanosine-3'-phosphate
  modified_base 11: mod_base = OTHER; note = cytidine-3'-phosphate
  modified_base 12: mod_base = OTHER; note = cytidine-3'-phosphate
  modified_base 13: mod_base = OTHER; note = cytidine-3'-phosphate
  modified_base 14: mod_base = OTHER; note = uridine-3'-phosphate
  modified_base 15: mod_base = OTHER; note = uridine-3'-phosphate
  modified_base 16: mod_base = OTHER; note = cytidine-3'-phosphate
  modified_base 17: mod_base = OTHER; note = cytidine-3'-phosphate
  modified_base 18: mod_base = OTHER; note = cytidine-3'-phosphate
  modified_base 19: mod_base = OTHER; note = uridine-3'-phosphate
  misc_feature 1..19: note = RNA
  misc_feature 20..21: note = DNA
gctaaccgtgcccttcccttt

SEQ ID NO: 431 - DNA, 21 bp, synthetic construct
  source 1..21: mol_type = other DNA
  modified_base 1: mod_base = OTHER; note = guanosine-3'-phosphate
  modified_base 2: mod_base = OTHER; note = guanosine-3'-phosphate
  modified_base 3: mod_base = OTHER; note = guanosine-3'-phosphate
  modified_base 4: mod_base = OTHER; note = adenosine-3'-phosphate
  modified_base 5: mod_base = OTHER; note = adenosine-3'-phosphate
  modified_base 6: mod_base = OTHER; note = guanosine-3'-phosphate
  modified_base 7: mod_base = OTHER; note = guanosine-3'-phosphate
  modified_base 8: mod_base = OTHER; note = guanosine-3'-phosphate
  modified_base 9: mod_base = OTHER; note = cytidine-3'-phosphate
  modified_base 10: mod_base = OTHER; note = adenosine-3'-phosphate
  modified_base 11: mod_base = OTHER; note = cytidine-3'-phosphate
  modified_base 12: mod_base = OTHER; note = guanosine-3'-phosphate
  modified_base 13: mod_base = OTHER; note = guanosine-3'-phosphate
  modified_base 14: mod_base = OTHER; note = uridine-3'-phosphate
  modified_base 15: mod_base = OTHER; note = uridine-3'-phosphate
  modified_base 16: mod_base = OTHER; note = adenosine-3'-phosphate
  modified_base 17: mod_base = OTHER; note = guanosine-3'-phosphate
  modified_base 18: mod_base = OTHER; note = cytidine-3'-phosphate
  modified_base 19: mod_base = OTHER; note = guanosine-3'-phosphate
  misc_feature 1..19: note = RNA
  misc_feature 20..21: note = DNA
gggaagggcacggttagcgtt

SEQ ID NO: 432 - DNA, 21 bp, synthetic construct
  source 1..21: mol_type = other DNA
  modified_base 1: mod_base = OTHER; note = cytidine-3'-phosphate
  modified_base 2: mod_base = OTHER; note = guanosine-3'-phosphate
  modified_base 3: mod_base = OTHER; note = cytidine-3'-phosphate
  modified_base 4: mod_base = OTHER; note = uridine-3'-phosphate
  modified_base 5: mod_base = OTHER; note = adenosine-3'-phosphate
  modified_base 6: mod_base = OTHER; note = adenosine-3'-phosphate
  modified_base 7: mod_base = OTHER; note = cytidine-3'-phosphate
  modified_base 8: mod_base = OTHER; note = cytidine-3'-phosphate
  modified_base 9: mod_base = OTHER; note = guanosine-3'-phosphate
  modified_base 10: mod_base = OTHER; note = uridine-3'-phosphate
  modified_base 11: mod_base = OTHER; note = guanosine-3'-phosphate
  modified_base 12: mod_base = OTHER; note = cytidine-3'-phosphate
  modified_base 13: mod_base = OTHER; note = cytidine-3'-phosphate
  modified_base 14: mod_base = OTHER; note = cytidine-3'-phosphate
  modified_base 15: mod_base = OTHER; note = uridine-3'-phosphate
  modified_base 16: mod_base = OTHER; note = uridine-3'-phosphate
  modified_base 17: mod_base = OTHER; note = cytidine-3'-phosphate
  modified_base 18: mod_base = OTHER; note = cytidine-3'-phosphate
  modified_base 19: mod_base = OTHER; note = cytidine-3'-phosphate
  misc_feature 1..19: note = RNA
  misc_feature 20..21: note = DNA
cgctaaccgtgcccttccctt

SEQ ID NO: 433 - DNA, 21 bp, synthetic construct
  source 1..21: mol_type = other DNA
  modified_base 1: mod_base = OTHER; note = guanosine-3'-phosphate
  modified_base 2: mod_base = OTHER; note = guanosine-3'-phosphate
  modified_base 3: mod_base = OTHER; note = adenosine-3'-phosphate
  modified_base 4: mod_base = OTHER; note = adenosine-3'-phosphate
  modified_base 5: mod_base = OTHER; note = guanosine-3'-phosphate
  modified_base 6: mod_base = OTHER; note = guanosine-3'-phosphate
  modified_base 7: mod_base = OTHER; note = guanosine-3'-phosphate
  modified_base 8: mod_base = OTHER; note = cytidine-3'-phosphate
  modified_base 9: mod_base = OTHER; note = adenosine-3'-phosphate
  modified_base 10: mod_base = OTHER; note = cytidine-3'-phosphate
  modified_base 11: mod_base = OTHER; note = guanosine-3'-phosphate
  modified_base 12: mod_base = OTHER; note = guanosine-3'-phosphate
  modified_base 13: mod_base = OTHER; note = uridine-3'-phosphate
  modified_base 14: mod_base = OTHER; note = uridine-3'-phosphate
  modified_base 15: mod_base = OTHER; note = adenosine-3'-phosphate
  modified_base 16: mod_base = OTHER; note = guanosine-3'-phosphate
  modified_base 17: mod_base = OTHER; note = cytidine-3'-phosphate
  modified_base 18: mod_base = OTHER; note = guanosine-3'-phosphate
  modified_base 19: mod_base = OTHER; note = guanosine-3'-phosphate
  misc_feature 1..19: note = RNA
  misc_feature 20..21: note = DNA
ggaagggcacggttagcggtt

SEQ ID NO: 434 - DNA, 21 bp, synthetic construct
  source 1..21: mol_type = other DNA
  modified_base 1: mod_base = OTHER; note = cytidine-3'-phosphate
  modified_base 2: mod_base = OTHER; note = cytidine-3'-phosphate
  modified_base 3: mod_base = OTHER; note = guanosine-3'-phosphate
  modified_base 4: mod_base = OTHER; note = cytidine-3'-phosphate
  modified_base 5: mod_base = OTHER; note = uridine-3'-phosphate
  modified_base 6: mod_base = OTHER; note = adenosine-3'-phosphate
  modified_base 7: mod_base = OTHER; note = adenosine-3'-phosphate
  modified_base 8: mod_base = OTHER; note = cytidine-3'-phosphate
  modified_base 9: mod_base = OTHER; note = cytidine-3'-phosphate
  modified_base 10: mod_base = OTHER; note = guanosine-3'-phosphate
  modified_base 11: mod_base = OTHER; note = uridine-3'-phosphate
  modified_base 12: mod_base = OTHER; note = guanosine-3'-phosphate
  modified_base 13: mod_base = OTHER; note = cytidine-3'-phosphate
  modified_base 14: mod_base = OTHER; note = cytidine-3'-phosphate
  modified_base 15: mod_base = OTHER; note = cytidine-3'-phosphate
  modified_base 16: mod_base = OTHER; note = uridine-3'-phosphate
  modified_base 17: mod_base = OTHER; note = uridine-3'-phosphate
  modified_base 18: mod_base = OTHER; note = cytidine-3'-phosphate
  modified_base 19: mod_base = OTHER; note = cytidine-3'-phosphate
  misc_feature 1..19: note = RNA
  misc_feature 20..21: note = DNA
ccgctaaccgtgcccttcctt

SEQ ID NO: 435 - DNA, 21 bp, synthetic construct
  source 1..21: mol_type = other DNA
  modified_base 1: mod_base = OTHER; note = guanosine-3'-phosphate
  modified_base 2: mod_base = OTHER; note = adenosine-3'-phosphate
  modified_base 3: mod_base = OTHER; note = adenosine-3'-phosphate
  modified_base 4: mod_base = OTHER; note = guanosine-3'-phosphate
  modified_base 5: mod_base = OTHER; note = guanosine-3'-phosphate
  modified_base 6: mod_base = OTHER; note = guanosine-3'-phosphate
  modified_base 7: mod_base = OTHER; note = cytidine-3'-phosphate
  modified_base 8: mod_base = OTHER; note = adenosine-3'-phosphate
  modified_base 9: mod_base = OTHER; note = cytidine-3'-phosphate
  modified_base 10: mod_base = OTHER; note = guanosine-3'-phosphate
  modified_base 11: mod_base = OTHER; note = guanosine-3'-phosphate
  modified_base 12: mod_base = OTHER; note = uridine-3'-phosphate
  modified_base 13: mod_base = OTHER; note = uridine-3'-phosphate
  modified_base 14: mod_base = OTHER; note = adenosine-3'-phosphate
  modified_base 15: mod_base = OTHER; note = guanosine-3'-phosphate
  modified_base 16: mod_base = OTHER; note = cytidine-3'-phosphate
  modified_base 17: mod_base = OTHER; note = guanosine-3'-phosphate
  modified_base 18: mod_base = OTHER; note = guanosine-3'-phosphate
  modified_base 19: mod_base = OTHER; note = cytidine-3'-phosphate
  misc_feature 1..19: note = RNA
  misc_feature 20..21: note = DNA
gaagggcacggttagcggctt

SEQ ID NO: 436 - DNA, 21 bp, synthetic construct
  source 1..21: mol_type = other DNA
  modified_base 1: mod_base = OTHER; note = guanosine-3'-phosphate
  modified_base 2: mod_base = OTHER; note = cytidine-3'-phosphate
  modified_base 3: mod_base = OTHER; note = cytidine-3'-phosphate
  modified_base 4: mod_base = OTHER; note = guanosine-3'-phosphate
  modified_base 5: mod_base = OTHER; note = cytidine-3'-phosphate
  modified_base 6: mod_base = OTHER; note = uridine-3'-phosphate
  modified_base 7: mod_base = OTHER; note = adenosine-3'-phosphate
  modified_base 8: mod_base = OTHER; note = adenosine-3'-phosphate
  modified_base 9: mod_base = OTHER; note = cytidine-3'-phosphate
  modified_base 10: mod_base = OTHER; note = cytidine-3'-phosphate
  modified_base 11: mod_base = OTHER; note = guanosine-3'-phosphate
  modified_base 12: mod_base = OTHER; note = uridine-3'-phosphate
  modified_base 13: mod_base = OTHER; note = guanosine-3'-phosphate
  modified_base 14: mod_base = OTHER; note = cytidine-3'-phosphate
  modified_base 15: mod_base = OTHER; note = cytidine-3'-phosphate
  modified_base 16: mod_base = OTHER; note = cytidine-3'-phosphate
  modified_base 17: mod_base = OTHER; note = uridine-3'-phosphate
  modified_base 18: mod_base = OTHER; note = uridine-3'-phosphate
  modified_base 19: mod_base = OTHER; note = cytidine-3'-phosphate
  misc_feature 1..19: note = RNA
  misc_feature 20..21: note = DNA
gccgctaaccgtgcccttctt

SEQ ID NO: 437 - DNA, 21 bp, synthetic construct
  source 1..21: mol_type = other DNA
  modified_base 1: mod_base = OTHER; note = adenosine-3'-phosphate
  modified_base 2: mod_base = OTHER; note = adenosine-3'-phosphate
  modified_base 3: mod_base = OTHER; note = guanosine-3'-phosphate
  modified_base 4: mod_base = OTHER; note = guanosine-3'-phosphate
  modified_base 5: mod_base = OTHER; note = guanosine-3'-phosphate
  modified_base 6: mod_base = OTHER; note = cytidine-3'-phosphate
  modified_base 7: mod_base = OTHER; note = adenosine-3'-phosphate
  modified_base 8: mod_base = OTHER; note = cytidine-3'-phosphate
  modified_base 9: mod_base = OTHER; note = guanosine-3'-phosphate
  modified_base 10: mod_base = OTHER; note = guanosine-3'-phosphate
  modified_base 11: mod_base = OTHER; note = uridine-3'-phosphate
  modified_base 12: mod_base = OTHER; note = uridine-3'-phosphate
  modified_base 13: mod_base = OTHER; note = adenosine-3'-phosphate
  modified_base 14: mod_base = OTHER; note = guanosine-3'-phosphate
  modified_base 15: mod_base = OTHER; note = cytidine-3'-phosphate
  modified_base 16: mod_base = OTHER; note = guanosine-3'-phosphate
  modified_base 17: mod_base = OTHER; note = guanosine-3'-phosphate
  modified_base 18: mod_base = OTHER; note = cytidine-3'-phosphate
  modified_base 19: mod_base = OTHER; note = adenosine-3'-phosphate
  misc_feature 1..19: note = RNA
  misc_feature 20..21: note = DNA
aagggcacggttagcggcatt

SEQ ID NO: 438 - DNA, 21 bp, synthetic construct
  source 1..21: mol_type = other DNA
  modified_base 1: mod_base = OTHER; note = uridine-3'-phosphate
  modified_base 2: mod_base = OTHER; note = guanosine-3'-phosphate
  modified_base 3: mod_base = OTHER; note = cytidine-3'-phosphate
  modified_base 4: mod_base = OTHER; note = cytidine-3'-phosphate
  modified_base 5: mod_base = OTHER; note = guanosine-3'-phosphate
  modified_base 6: mod_base = OTHER; note = cytidine-3'-phosphate
  modified_base 7: mod_base = OTHER; note = uridine-3'-phosphate
  modified_base 8: mod_base = OTHER; note = adenosine-3'-phosphate
  modified_base 9: mod_base = OTHER; note = adenosine-3'-phosphate
  modified_base 10: mod_base = OTHER; note = cytidine-3'-phosphate
  modified_base 11: mod_base = OTHER; note = cytidine-3'-phosphate
  modified_base 12: mod_base = OTHER; note = guanosine-3'-phosphate
  modified_base 13: mod_base = OTHER; note = uridine-3'-phosphate
  modified_base 14: mod_base = OTHER; note = guanosine-3'-phosphate
  modified_base 15: mod_base = OTHER; note = cytidine-3'-phosphate
  modified_base 16: mod_base = OTHER; note = cytidine-3'-phosphate
  modified_base 17: mod_base = OTHER; note = cytidine-3'-phosphate
  modified_base 18: mod_base = OTHER; note = uridine-3'-phosphate
  modified_base 19: mod_base = OTHER; note = uridine-3'-phosphate
  misc_feature 1..19: note = RNA
  misc_feature 20..21: note = DNA
tgccgctaaccgtgccctttt

SEQ ID NO: 439 - DNA, 21 bp, synthetic construct
  source 1..21: mol_type = other DNA
  modified_base 1: mod_base = OTHER; note = adenosine-3'-phosphate
  modified_base 2: mod_base = OTHER; note = guanosine-3'-phosphate
  modified_base 3: mod_base = OTHER; note = guanosine-3'-phosphate
  modified_base 4: mod_base = OTHER; note = guanosine-3'-phosphate
  modified_base 5: mod_base = OTHER; note = cytidine-3'-phosphate
  modified_base 6: mod_base = OTHER; note = adenosine-3'-phosphate
  modified_base 7: mod_base = OTHER; note = cytidine-3'-phosphate
  modified_base 8: mod_base = OTHER; note = guanosine-3'-phosphate
  modified_base 9: mod_base = OTHER; note = guanosine-3'-phosphate
  modified_base 10: mod_base = OTHER; note = uridine-3'-phosphate
  modified_base 11: mod_base = OTHER; note = uridine-3'-phosphate
  modified_base 12: mod_base = OTHER; note = adenosine-3'-phosphate
  modified_base 13: mod_base = OTHER; note = guanosine-3'-phosphate
  modified_base 14: mod_base = OTHER; note = cytidine-3'-phosphate
  modified_base 15: mod_base = OTHER; note = guanosine-3'-phosphate
  modified_base 16: mod_base = OTHER; note = guanosine-3'-phosphate
  modified_base 17: mod_base = OTHER; note = cytidine-3'-phosphate
  modified_base 18: mod_base = OTHER; note = adenosine-3'-phosphate
  modified_base 19: mod_base = OTHER; note = cytidine-3'-phosphate
  misc_feature 1..19: note = RNA
  misc_feature 20..21: note = DNA
agggcacggttagcggcactt

SEQ ID NO: 440 - DNA, 21 bp, synthetic construct
  source 1..21: mol_type = other DNA
  modified_base 1: mod_base = OTHER; note = guanosine-3'-phosphate
  modified_base 2: mod_base = OTHER; note = uridine-3'-phosphate
  modified_base 3: mod_base = OTHER; note = guanosine-3'-phosphate
  modified_base 4: mod_base = OTHER; note = cytidine-3'-phosphate
  modified_base 5: mod_base = OTHER; note = cytidine-3'-phosphate
  modified_base 6: mod_base = OTHER; note = guanosine-3'-phosphate
  modified_base 7: mod_base = OTHER; note = cytidine-3'-phosphate
  modified_base 8: mod_base = OTHER; note = uridine-3'-phosphate
  modified_base 9: mod_base = OTHER; note = adenosine-3'-phosphate
  modified_base 10: mod_base = OTHER; note = adenosine-3'-phosphate
  modified_base 11: mod_base = OTHER; note = cytidine-3'-phosphate
  modified_base 12: mod_base = OTHER; note = cytidine-3'-phosphate
  modified_base 13: mod_base = OTHER; note = guanosine-3'-phosphate
  modified_base 14: mod_base = OTHER; note = uridine-3'-phosphate
  modified_base 15: mod_base = OTHER; note = guanosine-3'-phosphate
  modified_base 16: mod_base = OTHER; note = cytidine-3'-phosphate
  modified_base 17: mod_base = OTHER; note = cytidine-3'-phosphate
  modified_base 18: mod_base = OTHER; note = cytidine-3'-phosphate
  modified_base 19: mod_base = OTHER; note = uridine-3'-phosphate
  misc_feature 1..19: note = RNA
  misc_feature 20..21: note = DNA
gtgccgctaaccgtgcccttt

SEQ ID NO: 441 - DNA, 21 bp, synthetic construct
  source 1..21: mol_type = other DNA
  modified_base 1: mod_base = OTHER; note = cytidine-3'-phosphate
  modified_base 2: mod_base = OTHER; note = adenosine-3'-phosphate
  modified_base 3: mod_base = OTHER; note = cytidine-3'-phosphate
  modified_base 4: mod_base = OTHER; note = guanosine-3'-phosphate
  modified_base 5: mod_base = OTHER; note = guanosine-3'-phosphate
  modified_base 6: mod_base = OTHER; note = uridine-3'-phosphate
  modified_base 7: mod_base = OTHER; note = uridine-3'-phosphate
  modified_base 8: mod_base = OTHER; note = adenosine-3'-phosphate
  modified_base 9: mod_base = OTHER; note = guanosine-3'-phosphate
  modified_base 10: mod_base = OTHER; note = cytidine-3'-phosphate
  modified_base 11: mod_base = OTHER; note = guanosine-3'-phosphate
  modified_base 12: mod_base = OTHER; note = guanosine-3'-phosphate
  modified_base 13: mod_base = OTHER; note = cytidine-3'-phosphate
  modified_base 14: mod_base = OTHER; note = adenosine-3'-phosphate
  modified_base 15: mod_base = OTHER; note = cytidine-3'-phosphate
  modified_base 16: mod_base = OTHER; note = cytidine-3'-phosphate
  modified_base 17: mod_base = OTHER; note = cytidine-3'-phosphate
  modified_base 18: mod_base = OTHER; note = uridine-3'-phosphate
  modified_base 19: mod_base = OTHER; note = cytidine-3'-phosphate
  misc_feature 1..19: note = RNA
  misc_feature 20..21: note = DNA
cacggttagcggcaccctctt

SEQ ID NO: 442 - DNA, 21 bp, synthetic construct
  source 1..21: mol_type = other DNA
  modified_base 1: mod_base = OTHER; note = guanosine-3'-phosphate
  modified_base 2: mod_base = OTHER; note = adenosine-3'-phosphate
  modified_base 3: mod_base = OTHER; note = guanosine-3'-phosphate
  modified_base 4: mod_base = OTHER; note = guanosine-3'-phosphate
  modified_base 5: mod_base = OTHER; note = guanosine-3'-phosphate
  modified_base 6: mod_base = OTHER; note = uridine-3'-phosphate
  modified_base 7: mod_base = OTHER; note = guanosine-3'-phosphate
  modified_base 8: mod_base = OTHER; note = cytidine-3'-phosphate
  modified_base 9: mod_base = OTHER; note = cytidine-3'-phosphate
  modified_base 10: mod_base = OTHER; note = guanosine-3'-phosphate
  modified_base 11: mod_base = OTHER; note = cytidine-3'-phosphate
  modified_base 12: mod_base = OTHER; note = uridine-3'-phosphate
  modified_base 13: mod_base = OTHER; note = adenosine-3'-phosphate
  modified_base 14: mod_base = OTHER; note = adenosine-3'-phosphate
  modified_base 15: mod_base = OTHER; note = cytidine-3'-phosphate
  modified_base 16: mod_base = OTHER; note = cytidine-3'-phosphate
  modified_base 17: mod_base = OTHER; note = guanosine-3'-phosphate
  modified_base 18: mod_base = OTHER; note = uridine-3'-phosphate
  modified_base 19: mod_base = OTHER; note = guanosine-3'-phosphate
  misc_feature 1..19: note = RNA
  misc_feature 20..21: note = DNA
gagggtgccgctaaccgtgtt

SEQ ID NO: 443 - DNA, 21 bp, synthetic construct
  source 1..21: mol_type = other DNA
  modified_base 1: mod_base = OTHER; note = adenosine-3'-phosphate
  modified_base 2: mod_base = OTHER; note = cytidine-3'-phosphate
  modified_base 3: mod_base = OTHER; note = guanosine-3'-phosphate
  modified_base 4: mod_base = OTHER; note = guanosine-3'-phosphate
  modified_base 5: mod_base = OTHER; note = uridine-3'-phosphate
  modified_base 6: mod_base = OTHER; note = uridine-3'-phosphate
  modified_base 7: mod_base = OTHER; note = adenosine-3'-phosphate
  modified_base 8: mod_base = OTHER; note = guanosine-3'-phosphate
  modified_base 9: mod_base = OTHER; note = cytidine-3'-phosphate
  modified_base 10: mod_base = OTHER; note = guanosine-3'-phosphate
  modified_base 11: mod_base = OTHER; note = guanosine-3'-phosphate
  modified_base 12: mod_base = OTHER; note = cytidine-3'-phosphate
  modified_base 13: mod_base = OTHER; note = adenosine-3'-phosphate
  modified_base 14: mod_base = OTHER; note = cytidine-3'-phosphate
  modified_base 15: mod_base = OTHER; note = cytidine-3'-phosphate
  modified_base 16: mod_base = OTHER; note = cytidine-3'-phosphate
  modified_base 17: mod_base = OTHER; note = uridine-3'-phosphate
  modified_base 18: mod_base = OTHER; note = cytidine-3'-phosphate
  modified_base 19: mod_base = OTHER; note = adenosine-3'-phosphate
  misc_feature 1..19: note = RNA
  misc_feature 20..21: note = DNA
acggttagcggcaccctcatt

SEQ ID NO: 444 - DNA, 21 bp, synthetic construct
  source 1..21: mol_type = other DNA
  modified_base 1: mod_base = OTHER; note = uridine-3'-phosphate
  modified_base 2: mod_base = OTHER; note = guanosine-3'-phosphate
  modified_base 3: mod_base = OTHER; note = adenosine-3'-phosphate
  modified_base 4: mod_base = OTHER; note = guanosine-3'-phosphate
  modified_base 5: mod_base = OTHER; note = guanosine-3'-phosphate
  modified_base 6: mod_base = OTHER; note = guanosine-3'-phosphate
  modified_base 7: mod_base = OTHER; note = uridine-3'-phosphate
  modified_base 8: mod_base = OTHER; note = guanosine-3'-phosphate
  modified_base 9: mod_base = OTHER; note = cytidine-3'-phosphate
  modified_base 10: mod_base = OTHER; note = cytidine-3'-phosphate
  modified_base 11: mod_base = OTHER; note = guanosine-3'-phosphate
  modified_base 12: mod_base = OTHER; note = cytidine-3'-phosphate
  modified_base 13: mod_base = OTHER; note = uridine-3'-phosphate
  modified_base 14: mod_base = OTHER; note = adenosine-3'-phosphate
  modified_base 15: mod_base = OTHER; note = adenosine-3'-phosphate
  modified_base 16: mod_base = OTHER; note = cytidine-3'-phosphate
  modified_base 17: mod_base = OTHER; note = cytidine-3'-phosphate
  modified_base 18: mod_base = OTHER; note = guanosine-3'-phosphate
  modified_base 19: mod_base = OTHER; note = uridine-3'-phosphate
  misc_feature 1..19: note = RNA
  misc_feature 20..21: note = DNA
tgagggtgccgctaaccgttt

SEQ ID NO: 445 - DNA, 21 bp, synthetic construct
  source 1..21: mol_type = other DNA
  modified_base 1: mod_base = OTHER; note = guanosine-3'-phosphate
  modified_base 2: mod_base = OTHER; note = uridine-3'-phosphate
  modified_base 3: mod_base = OTHER; note = uridine-3'-phosphate
  modified_base 4: mod_base = OTHER; note = adenosine-3'-phosphate
  modified_base 5: mod_base = OTHER; note = guanosine-3'-phosphate
  modified_base 6: mod_base = OTHER; note = cytidine-3'-phosphate
  modified_base 7: mod_base = OTHER; note = guanosine-3'-phosphate
  modified_base 8: mod_base = OTHER; note = guanosine-3'-phosphate
  modified_base 9: mod_base = OTHER; note = cytidine-3'-phosphate
  modified_base 10: mod_base = OTHER; note = adenosine-3'-phosphate
  modified_base 11: mod_base = OTHER; note = cytidine-3'-phosphate
  modified_base 12: mod_base = OTHER; note = cytidine-3'-phosphate
  modified_base 13: mod_base = OTHER; note = cytidine-3'-phosphate
  modified_base 14: mod_base = OTHER; note = uridine-3'-phosphate
  modified_base 15: mod_base = OTHER; note = cytidine-3'-phosphate
  modified_base 16: mod_base = OTHER; note = adenosine-3'-phosphate
  modified_base 17: mod_base = OTHER; note = uridine-3'-phosphate
  modified_base 18: mod_base = OTHER; note = adenosine-3'-phosphate
  modified_base 19: mod_base = OTHER; note = guanosine-3'-phosphate
  misc_feature 1..19: note = RNA
  misc_feature 20..21: note = DNA
gttagcggcaccctcatagtt

SEQ ID NO: 446 - DNA, 21 bp, synthetic construct
  source 1..21: mol_type = other DNA
  modified_base 1: mod_base = OTHER; note = cytidine-3'-phosphate
  modified_base 2: mod_base = OTHER; note = uridine-3'-phosphate
  modified_base 3: mod_base = OTHER; note = adenosine-3'-phosphate
  modified_base 4: mod_base = OTHER; note = uridine-3'-phosphate
  modified_base 5: mod_base = OTHER; note = guanosine-3'-phosphate
  modified_base 6: mod_base = OTHER; note = adenosine-3'-phosphate
  modified_base 7: mod_base = OTHER; note = guanosine-3'-phosphate
  modified_base 8: mod_base = OTHER; note = guanosine-3'-phosphate
  modified_base 9: mod_base = OTHER; note = guanosine-3'-phosphate
  modified_base 10: mod_base = OTHER; note = uridine-3'-phosphate
  modified_base 11: mod_base = OTHER; note = guanosine-3'-phosphate
  modified_base 12: mod_base = OTHER; note = cytidine-3'-phosphate
  modified_base 13: mod_base = OTHER; note = cytidine-3'-phosphate
  modified_base 14: mod_base = OTHER; note = guanosine-3'-phosphate
  modified_base 15: mod_base = OTHER; note = cytidine-3'-phosphate
  modified_base 16: mod_base = OTHER; note = uridine-3'-phosphate
  modified_base 17: mod_base = OTHER; note = adenosine-3'-phosphate
  modified_base 18: mod_base = OTHER; note = adenosine-3'-phosphate
  modified_base 19: mod_base = OTHER; note = cytidine-3'-phosphate
  misc_feature 1..19: note = RNA
  misc_feature 20..21: note = DNA
ctatgagggtgccgctaactt

SEQ ID NO: 447 - DNA, 21 bp, synthetic construct
  source 1..21: mol_type = other DNA
  modified_base 1: mod_base = OTHER; note = uridine-3'-phosphate
  modified_base 2: mod_base = OTHER; note = uridine-3'-phosphate
  modified_base 3: mod_base = OTHER; note = adenosine-3'-phosphate
  modified_base 4: mod_base = OTHER; note = guanosine-3'-phosphate
  modified_base 5: mod_base = OTHER; note = cytidine-3'-phosphate
  modified_base 6: mod_base = OTHER; note = guanosine-3'-phosphate
  modified_base 7: mod_base = OTHER; note = guanosine-3'-phosphate
  modified_base 8: mod_base = OTHER; note = cytidine-3'-phosphate
  modified_base 9: mod_base = OTHER; note = adenosine-3'-phosphate
  modified_base 10: mod_base = OTHER; note = cytidine-3'-phosphate
  modified_base 11: mod_base = OTHER; note = cytidine-3'-phosphate
  modified_base 12: mod_base = OTHER; note = cytidine-3'-phosphate
  modified_base 13: mod_base = OTHER; note = uridine-3'-phosphate
  modified_base 14: mod_base = OTHER; note = cytidine-3'-phosphate
  modified_base 15: mod_base = OTHER; note = adenosine-3'-phosphate
  modified_base 16: mod_base = OTHER; note = uridine-3'-phosphate
  modified_base 17: mod_base = OTHER; note = adenosine-3'-phosphate
  modified_base 18: mod_base = OTHER; note = guanosine-3'-phosphate
  modified_base 19: mod_base = OTHER; note = guanosine-3'-phosphate
  misc_feature 1..19: note = RNA
  misc_feature 20..21: note = DNA
ttagcggcaccctcataggtt

SEQ ID NO: 448 - DNA, 21 bp, synthetic construct
  source 1..21: mol_type = other DNA
  modified_base 1: mod_base = OTHER; note = cytidine-3'-phosphate
  modified_base 2: mod_base = OTHER; note = cytidine-3'-phosphate
  modified_base 3: mod_base = OTHER; note = uridine-3'-phosphate
  modified_base 4: mod_base = OTHER; note = adenosine-3'-phosphate
  modified_base 5: mod_base = OTHER; note = uridine-3'-phosphate
  modified_base 6: mod_base = OTHER; note = guanosine-3'-phosphate
  modified_base 7: mod_base = OTHER; note = adenosine-3'-phosphate
  modified_base 8: mod_base = OTHER; note = guanosine-3'-phosphate
  modified_base 9: mod_base = OTHER; note = guanosine-3'-phosphate
  modified_base 10: mod_base = OTHER; note = guanosine-3'-phosphate
  modified_base 11: mod_base = OTHER; note = uridine-3'-phosphate
  modified_base 12: mod_base = OTHER; note = guanosine-3'-phosphate
  modified_base 13: mod_base = OTHER; note = cytidine-3'-phosphate
  modified_base 14: mod_base = OTHER; note = cytidine-3'-phosphate
  modified_base 15: mod_base = OTHER; note = guanosine-3'-phosphate
  modified_base 16: mod_base = OTHER; note = cytidine-3'-phosphate
  modified_base 17: mod_base = OTHER; note = uridine-3'-phosphate
  modified_base 18: mod_base = OTHER; note = adenosine-3'-phosphate
  modified_base 19: mod_base = OTHER; note = adenosine-3'-phosphate
  misc_feature 1..19: note = RNA
  misc_feature 20..21: note = DNA
cctatgagggtgccgctaatt

SEQ ID NO: 449 - DNA, 21 bp, synthetic construct
  source 1..21: mol_type = other DNA
  modified_base 1: mod_base = OTHER; note = guanosine-3'-phosphate
  modified_base 2: mod_base = OTHER; note = cytidine-3'-phosphate
  modified_base 3: mod_base = OTHER; note = guanosine-3'-phosphate
  modified_base 4: mod_base = OTHER; note = guanosine-3'-phosphate
  modified_base 5: mod_base = OTHER; note = cytidine-3'-phosphate
  modified_base 6: mod_base = OTHER; note = adenosine-3'-phosphate
  modified_base 7: mod_base = OTHER; note = cytidine-3'-phosphate
  modified_base 8: mod_base = OTHER; note = cytidine-3'-phosphate
  modified_base 9: mod_base = OTHER; note = cytidine-3'-phosphate
  modified_base 10: mod_base = OTHER; note = uridine-3'-phosphate
  modified_base 11: mod_base = OTHER; note = cytidine-3'-phosphate
  modified_base 12: mod_base = OTHER; note = adenosine-3'-phosphate
  modified_base 13: mod_base = OTHER; note = uridine-3'-phosphate
  modified_base 14: mod_base = OTHER; note = adenosine-3'-phosphate
  modified_base 15: mod_base = OTHER; note = guanosine-3'-phosphate
  modified_base 16: mod_base = OTHER; note = guanosine-3'-phosphate
  modified_base 17: mod_base = OTHER; note = cytidine-3'-phosphate
  modified_base 18: mod_base = OTHER; note = cytidine-3'-phosphate
  modified_base 19: mod_base = OTHER; note = uridine-3'-phosphate
  modified_base 20: mod_base = OTHER; note = 2'-deoxythymidine-3'-phosphorothioate
  misc_feature 1..19: note = RNA
  misc_feature 20..21: note = DNA
gcggcaccctcataggccttt

SEQ ID NO: 450 - DNA, 21 bp, synthetic construct
  source 1..21: mol_type = other DNA
  modified_base 1: mod_base = OTHER; note = adenosine-3'-phosphate
  modified_base 2: mod_base = OTHER; note = guanosine-3'-phosphate
  modified_base 3: mod_base = OTHER; note = guanosine-3'-phosphate
  modified_base 4: mod_base = OTHER; note = cytidine-3'-phosphate
  modified_base 5: mod_base = OTHER; note = cytidine-3'-phosphate
  modified_base 6: mod_base = OTHER; note = uridine-3'-phosphate
  modified_base 7: mod_base = OTHER; note = adenosine-3'-phosphate
  modified_base 8: mod_base = OTHER; note = uridine-3'-phosphate
  modified_base 9: mod_base = OTHER; note = guanosine-3'-phosphate
  modified_base 10: mod_base = OTHER; note = adenosine-3'-phosphate
  modified_base 11: mod_base = OTHER; note = guanosine-3'-phosphate
  modified_base 12: mod_base = OTHER; note = guanosine-3'-phosphate
  modified_base 13: mod_base = OTHER; note = guanosine-3'-phosphate
  modified_base 14: mod_base = OTHER; note = uridine-3'-phosphate
  modified_base 15: mod_base = OTHER; note = guanosine-3'-phosphate
  modified_base 16: mod_base = OTHER; note = cytidine-3'-phosphate
  modified_base 17: mod_base = OTHER; note = cytidine-3'-phosphate
  modified_base 18: mod_base = OTHER; note = guanosine-3'-phosphate
  modified_base 19: mod_base = OTHER; note = cytidine-3'-phosphate
  modified_base 20: mod_base = OTHER; note = 2'-deoxythymidine-3'-phosphorothioate
  misc_feature 1..19: note = RNA
  misc_feature 20..21: note = DNA
aggcctatgagggtgccgctt

SEQ ID NO: 451 - DNA, 21 bp, synthetic construct
  source 1..21: mol_type = other DNA
  modified_base 1: mod_base = OTHER; note = guanosine-3'-phosphate
  modified_base 2: mod_base = OTHER; note = cytidine-3'-phosphate
  modified_base 3: mod_base = OTHER; note = adenosine-3'-phosphate
  modified_base 4: mod_base = OTHER; note = cytidine-3'-phosphate
  modified_base 5: mod_base = OTHER; note = cytidine-3'-phosphate
  modified_base 6: mod_base = OTHER; note = cytidine-3'-phosphate
  modified_base 7: mod_base = OTHER; note = uridine-3'-phosphate
  modified_base 8: mod_base = OTHER; note = cytidine-3'-phosphate
  modified_base 9: mod_base = OTHER; note = adenosine-3'-phosphate
  modified_base 10: mod_base = OTHER; note = uridine-3'-phosphate
  modified_base 11: mod_base = OTHER; note = adenosine-3'-phosphate
  modified_base 12: mod_base = OTHER; note = guanosine-3'-phosphate
  modified_base 13: mod_base = OTHER; note = guanosine-3'-phosphate
  modified_base 14: mod_base = OTHER; note = cytidine-3'-phosphate
  modified_base 15: mod_base = OTHER; note = cytidine-3'-phosphate
  modified_base 16: mod_base = OTHER; note = uridine-3'-phosphate
  modified_base 17: mod_base = OTHER; note = guanosine-3'-phosphate
  modified_base 18: mod_base = OTHER; note = guanosine-3'-phosphate
  modified_base 19: mod_base = OTHER; note = adenosine-3'-phosphate
  modified_base 20: mod_base = OTHER; note = 2'-deoxythymidine-3'-phosphorothioate
  misc_feature 1..19: note = RNA
  misc_feature 20..21: note = DNA
gcaccctcataggcctggatt

SEQ ID NO: 452 - DNA, 21 bp, synthetic construct
  source 1..21: mol_type = other DNA
  modified_base 1: mod_base = OTHER; note = uridine-3'-phosphate
  modified_base 2: mod_base = OTHER; note = cytidine-3'-phosphate
  modified_base 3: mod_base = OTHER; note = cytidine-3'-phosphate
  modified_base 4: mod_base = OTHER; note = adenosine-3'-phosphate
  modified_base 5: mod_base = OTHER; note = guanosine-3'-phosphate
  modified_base 6: mod_base = OTHER; note = guanosine-3'-phosphate
  modified_base 7: mod_base = OTHER; note = cytidine-3'-phosphate
  modified_base 8: mod_base = OTHER; note = cytidine-3'-phosphate
  modified_base 9: mod_base = OTHER; note = uridine-3'-phosphate
  modified_base 10: mod_base = OTHER; note = adenosine-3'-phosphate
  modified_base 11: mod_base = OTHER; note = uridine-3'-phosphate
  modified_base 12: mod_base = OTHER; note = guanosine-3'-phosphate
  modified_base 13: mod_base = OTHER; note = adenosine-3'-phosphate
  modified_base 14: mod_base = OTHER; note = guanosine-3'-phosphate
  modified_base 15: mod_base = OTHER; note = guanosine-3'-phosphate
  modified_base 16: mod_base = OTHER; note = guanosine-3'-phosphate
  modified_base 17: mod_base = OTHER; note = uridine-3'-phosphate
  modified_base 18: mod_base = OTHER; note = guanosine-3'-phosphate
  modified_base 19: mod_base = OTHER; note = cytidine-3'-phosphate
  modified_base 20: mod_base = OTHER; note = 2'-deoxythymidine-3'-phosphorothioate
  misc_feature 1..19: note = RNA
  misc_feature 20..21: note = DNA
tccaggcctatgagggtgctt

SEQ ID NO: 453 - DNA, 21 bp, synthetic construct
  source 1..21: mol_type = other DNA
  modified_base 1: mod_base = OTHER; note = uridine-3'-phosphate
  modified_base 2: mod_base = OTHER; note = cytidine-3'-phosphate
  modified_base 3: mod_base = OTHER; note = adenosine-3'-phosphate
  modified_base 4: mod_base = OTHER; note = uridine-3'-phosphate
  modified_base 5: mod_base = OTHER; note = adenosine-3'-phosphate
  modified_base 6: mod_base = OTHER; note = guanosine-3'-phosphate
  modified_base 7: mod_base = OTHER; note = guanosine-3'-phosphate
  modified_base 8: mod_base = OTHER; note = cytidine-3'-phosphate
  modified_base 9: mod_base = OTHER; note = cytidine-3'-phosphate
  modified_base 10: mod_base = OTHER; note = uridine-3'-phosphate
  modified_base 11: mod_base = OTHER; note = guanosine-3'-phosphate
  modified_base 12: mod_base = OTHER; note = guanosine-3'-phosphate
  modified_base 13: mod_base = OTHER; note = adenosine-3'-phosphate
  modified_base 14: mod_base = OTHER; note = guanosine-3'-phosphate
  modified_base 15: mod_base = OTHER; note = uridine-3'-phosphate
  modified_base 16: mod_base = OTHER; note = uridine-3'-phosphate
  modified_base 17: mod_base = OTHER; note = uridine-3'-phosphate
  modified_base 18: mod_base = OTHER; note = adenosine-3'-phosphate
  modified_base 19: mod_base = OTHER; note = uridine-3'-phosphate
  modified_base 20: mod_base = OTHER; note = 2'-deoxythymidine-3'-phosphorothioate
  misc_feature 1..19: note = RNA
  misc_feature 20..21: note = DNA
tcataggcctggagtttattt

SEQ ID NO: 454 - DNA, 21 bp, synthetic construct
  source 1..21: mol_type = other DNA
  modified_base 1: mod_base = OTHER; note = adenosine-3'-phosphate
  modified_base 2: mod_base = OTHER; note = uridine-3'-phosphate
  modified_base 3: mod_base = OTHER; note = adenosine-3'-phosphate
  modified_base 4: mod_base = OTHER; note = adenosine-3'-phosphate
  modified_base 5: mod_base = OTHER; note = adenosine-3'-phosphate
  modified_base 6: mod_base = OTHER; note = cytidine-3'-phosphate
  modified_base 7: mod_base = OTHER; note = uridine-3'-phosphate
  modified_base 8: mod_base = OTHER; note = cytidine-3'-phosphate
  modified_base 9: mod_base = OTHER; note = cytidine-3'-phosphate
  modified_base 10: mod_base = OTHER; note = adenosine-3'-phosphate
  modified_base 11: mod_base = OTHER; note = guanosine-3'-phosphate
  modified_base 12: mod_base = OTHER; note = guanosine-3'-phosphate
  modified_base 13: mod_base = OTHER; note = cytidine-3'-phosphate
  modified_base 14: mod_base = OTHER; note = cytidine-3'-phosphate
  modified_base 15: mod_base = OTHER; note = uridine-3'-phosphate
  modified_base 16: mod_base = OTHER; note = adenosine-3'-phosphate
  modified_base 17: mod_base = OTHER; note = uridine-3'-phosphate
  modified_base 18: mod_base = OTHER; note = guanosine-3'-phosphate
  modified_base 19: mod_base = OTHER; note = adenosine-3'-phosphate
  modified_base 20: mod_base = OTHER; note = 2'-deoxythymidine-3'-phosphorothioate
  misc_feature 1..19: note = RNA
  misc_feature 20..21: note = DNA
ataaactccaggcctatgatt

SEQ ID NO: 455 - DNA, 21 bp, synthetic construct
  source 1..21: mol_type = other DNA
  modified_base 1: mod_base = OTHER; note = guanosine-3'-phosphate
  modified_base 2: mod_base = OTHER; note = guanosine-3'-phosphate
  modified_base 3: mod_base = OTHER; note = cytidine-3'-phosphate
  modified_base 4: mod_base = OTHER; note = cytidine-3'-phosphate
  modified_base 5: mod_base = OTHER; note = uridine-3'-phosphate
  modified_base 6: mod_base = OTHER; note = guanosine-3'-phosphate
  modified_base 7: mod_base = OTHER; note = guanosine-3'-phosphate
  modified_base 8: mod_base = OTHER; note = adenosine-3'-phosphate
  modified_base 9: mod_base = OTHER; note = guanosine-3'-phosphate
  modified_base 10: mod_base = OTHER; note = uridine-3'-phosphate
  modified_base 11: mod_base = OTHER; note = uridine-3'-phosphate
  modified_base 12: mod_base = OTHER; note = uridine-3'-phosphate
  modified_base 13: mod_base = OTHER; note = adenosine-3'-phosphate
  modified_base 14: mod_base = OTHER; note = uridine-3'-phosphate
  modified_base 15: mod_base = OTHER; note = uridine-3'-phosphate
  modified_base 16: mod_base = OTHER; note = cytidine-3'-phosphate
  modified_base 17: mod_base = OTHER; note = guanosine-3'-phosphate
  modified_base 18: mod_base = OTHER; note = guanosine-3'-phosphate
  modified_base 19: mod_base = OTHER; note = adenosine-3'-phosphate
  modified_base 20: mod_base = OTHER; note = 2'-deoxythymidine-3'-phosphorothioate
  misc_feature 1..19: note = RNA
  misc_feature 20..21: note = DNA
ggcctggagtttattcggatt

SEQ ID NO: 456 - DNA, 21 bp, synthetic construct
  source 1..21: mol_type = other DNA
  modified_base 1: mod_base = OTHER; note = uridine-3'-phosphate
  modified_base 2: mod_base = OTHER; note = cytidine-3'-phosphate
  modified_base 3: mod_base = OTHER; note = cytidine-3'-phosphate
  modified_base 4: mod_base = OTHER; note = guanosine-3'-phosphate
  modified_base 5: mod_base = OTHER; note = adenosine-3'-phosphate
  modified_base 6: mod_base = OTHER; note = adenosine-3'-phosphate
  modified_base 7: mod_base = OTHER; note = uridine-3'-phosphate
  modified_base 8: mod_base = OTHER; note = adenosine-3'-phosphate
  modified_base 9: mod_base = OTHER; note = adenosine-3'-phosphate
  modified_base 10: mod_base = OTHER; note = adenosine-3'-phosphate
  modified_base 11: mod_base = OTHER; note = cytidine-3'-phosphate
  modified_base 12: mod_base = OTHER; note = uridine-3'-phosphate
  modified_base 13: mod_base = OTHER; note = cytidine-3'-phosphate
  modified_base 14: mod_base = OTHER; note = cytidine-3'-phosphate
  modified_base 15: mod_base = OTHER; note = adenosine-3'-phosphate
  modified_base 16: mod_base = OTHER; note = guanosine-3'-phosphate
  modified_base 17: mod_base = OTHER; note = guanosine-3'-phosphate
  modified_base 18: mod_base = OTHER; note = cytidine-3'-phosphate
  modified_base 19: mod_base = OTHER; note = cytidine-3'-phosphate
  modified_base 20: mod_base = OTHER; note = 2'-deoxythymidine-3'-phosphorothioate
  misc_feature 1..19: note = RNA
  misc_feature 20..21: note = DNA
tccgaataaactccaggcctt

SEQ ID NO: 457 - DNA, 21 bp, synthetic construct
  source 1..21: mol_type = other DNA
  modified_base 1: mod_base = OTHER; note = guanosine-3'-phosphate
  modified_base 2: mod_base = OTHER; note = cytidine-3'-phosphate
  modified_base 3: mod_base = OTHER; note = cytidine-3'-phosphate
  modified_base 4: mod_base = OTHER; note = uridine-3'-phosphate
  modified_base 5: mod_base = OTHER; note = guanosine-3'-phosphate
  modified_base 6: mod_base = OTHER; note = guanosine-3'-phosphate
  modified_base 7: mod_base = OTHER; note = adenosine-3'-phosphate
  modified_base 8: mod_base = OTHER; note = guanosine-3'-phosphate
  modified_base 9: mod_base = OTHER; note = uridine-3'-phosphate
  modified_base 10: mod_base = OTHER; note = uridine-3'-phosphate
  modified_base 11: mod_base = OTHER; note = uridine-3'-phosphate
  modified_base 12: mod_base = OTHER; note = adenosine-3'-phosphate
  modified_base 13: mod_base = OTHER; note = uridine-3'-phosphate
  modified_base 14: mod_base = OTHER; note = uridine-3'-phosphate
  modified_base 15: mod_base = OTHER; note = cytidine-3'-phosphate
  modified_base 16: mod_base = OTHER; note = guanosine-3'-phosphate
  modified_base 17: mod_base = OTHER; note = guanosine-3'-phosphate
  modified_base 18: mod_base = OTHER; note = adenosine-3'-phosphate
  modified_base 19: mod_base = OTHER; note = adenosine-3'-phosphate
  modified_base 20: mod_base = OTHER; note = 2'-deoxythymidine-3'-phosphorothioate
  misc_feature 1..19: note = RNA
  misc_feature 20..21: note = DNA
gcctggagtttattcggaatt

SEQ ID NO: 458 - DNA, 21 bp, synthetic construct
  source 1..21: mol_type = other DNA
  modified_base 1: mod_base = OTHER; note = uridine-3'-phosphate
  modified_base 2: mod_base = OTHER; note = uridine-3'-phosphate
  modified_base 3: mod_base = OTHER; note = cytidine-3'-phosphate
  modified_base 4: mod_base = OTHER; note = cytidine-3'-phosphate
  modified_base 5: mod_base = OTHER; note = guanosine-3'-phosphate
  modified_base 6: mod_base = OTHER; note = adenosine-3'-phosphate
  modified_base 7: mod_base = OTHER; note = adenosine-3'-phosphate
  modified_base 8: mod_base = OTHER; note = uridine-3'-phosphate
  modified_base 9: mod_base = OTHER; note = adenosine-3'-phosphate
  modified_base 10: mod_base = OTHER; note = adenosine-3'-phosphate
  modified_base 11: mod_base = OTHER; note = adenosine-3'-phosphate
  modified_base 12: mod_base = OTHER; note = cytidine-3'-phosphate
  modified_base 13: mod_base = OTHER; note = uridine-3'-phosphate
  modified_base 14: mod_base = OTHER; note = cytidine-3'-phosphate
  modified_base 15: mod_base = OTHER; note = cytidine-3'-phosphate
  modified_base 16: mod_base = OTHER; note = adenosine-3'-phosphate
  modified_base 17: mod_base = OTHER; note = guanosine-3'-phosphate
  modified_base 18: mod_base = OTHER; note = guanosine-3'-phosphate
  modified_base 19: mod_base = OTHER; note = cytidine-3'-phosphate
  modified_base 20: mod_base = OTHER; note = 2'-deoxythymidine-3'-phosphorothioate
  misc_feature 1..19: note = RNA
  misc_feature 20..21: note = DNA
ttccgaataaactccaggctt

SEQ ID NO: 459 - DNA, 21 bp, synthetic construct
  source 1..21: mol_type = other DNA
  modified_base 1: mod_base = OTHER; note = guanosine-3'-phosphate
  modified_base 2: mod_base = OTHER; note = 2'-O-methylcytidine-3'-phosphate
  modified_base 3: mod_base = OTHER; note = 2'-O-methylcytidine-3'-phosphate
  modified_base 4: mod_base = OTHER; note = 2'-O-methyluridine-3'-phosphate
  modified_base 5: mod_base = OTHER; note = guanosine-3'-phosphate
  modified_base 6: mod_base = OTHER; note = guanosine-3'-phosphate
  modified_base 7: mod_base = OTHER; note = adenosine-3'-phosphate
  modified_base 8: mod_base = OTHER; note = guanosine-3'-phosphate
  modified_base 9: mod_base = OTHER; note = 2'-O-methyluridine-3'-phosphate
  modified_base 10: mod_base = OTHER; note = 2'-O-methyluridine-3'-phosphate
  modified_base 11: mod_base = OTHER; note = 2'-O-methyluridine-3'-phosphate
  modified_base 12: mod_base = OTHER; note = adenosine-3'-phosphate
  modified_base 13: mod_base = OTHER; note = 2'-O-methyluridine-3'-phosphate
  modified_base 14: mod_base = OTHER; note = 2'-O-methyluridine-3'-phosphate
  modified_base 15: mod_base = OTHER; note = 2'-O-methylcytidine-3'-phosphate
  modified_base 16: mod_base = OTHER; note = guanosine-3'-phosphate
  modified_base 17: mod_base = OTHER; note = guanosine-3'-phosphate
  modified_base 18: mod_base = OTHER; note = adenosine-3'-phosphate
  modified_base 19: mod_base = OTHER; note = adenosine-3'-phosphate
  modified_base 20: mod_base = OTHER; note = 2'-deoxythymidine-3'-phosphorothioate
  misc_feature 1..19: note = RNA
  misc_feature 20..21: note = DNA
gcctggagtttattcggaatt

SEQ ID NO: 460 - DNA, 21 bp, synthetic construct
  source 1..21: mol_type = other DNA
  modified_base 1: mod_base = OTHER; note = uridine-3'-phosphate
  modified_base 2: mod_base = OTHER; note = uridine-3'-phosphate
  modified_base 3: mod_base = OTHER; note = cytidine-3'-phosphate
  modified_base 4: mod_base = OTHER; note = cytidine-3'-phosphate
  modified_base 5: mod_base = OTHER; note = guanosine-3'-phosphate
  modified_base 6: mod_base = OTHER; note = adenosine-3'-phosphate
  modified_base 7: mod_base = OTHER; note = adenosine-3'-phosphate
  modified_base 8: mod_base = OTHER; note = 2'-O-methyluridine-3'-phosphate
  modified_base 9: mod_base = OTHER; note = adenosine-3'-phosphate
  modified_base 10: mod_base = OTHER; note = adenosine-3'-phosphate
  modified_base 11: mod_base = OTHER; note = adenosine-3'-phosphate
  modified_base 12: mod_base = OTHER; note = cytidine-3'-phosphate
  modified_base 13: mod_base = OTHER; note = uridine-3'-phosphate
  modified_base 14: mod_base = OTHER; note = cytidine-3'-phosphate
  modified_base 15: mod_base = OTHER; note = 2'-O-methylcytidine-3'-phosphate
  modified_base 16: mod_base = OTHER; note = adenosine-3'-phosphate
  modified_base 17: mod_base = OTHER; note = guanosine-3'-phosphate
  modified_base 18: mod_base = OTHER; note = guanosine-3'-phosphate
  modified_base 19: mod_base = OTHER; note = cytidine-3'-phosphate
  modified_base 20: mod_base = OTHER; note = 2'-deoxythymidine-3'-phosphorothioate
  misc_feature 1..19: note = RNA
  misc_feature 20..21: note = DNA
ttccgaataaactccaggctt

SEQ ID NO: 461 - DNA, 21 bp, synthetic construct
  source 1..21: mol_type = other DNA
  modified_base 1: mod_base = OTHER; note = guanosine-3'-phosphate
  modified_base 2: mod_base = OTHER; note = 2'-O-methylcytidine-3'-phosphate
  modified_base 3: mod_base = OTHER; note = 2'-O-methylcytidine-3'-phosphate
  modified_base 4: mod_base = OTHER; note = 2'-O-methyluridine-3'-phosphate
  modified_base 5: mod_base = OTHER; note = guanosine-3'-phosphate
  modified_base 6: mod_base = OTHER; note = guanosine-3'-phosphate
  modified_base 7: mod_base = OTHER; note = adenosine-3'-phosphate
  modified_base 8: mod_base = OTHER; note = guanosine-3'-phosphate
  modified_base 9: mod_base = OTHER; note = 2'-O-methyluridine-3'-phosphate
  modified_base 10: mod_base = OTHER; note = 2'-O-methyluridine-3'-phosphate
  modified_base 11: mod_base = OTHER; note = 2'-O-methyluridine-3'-phosphate
  modified_base 12: mod_base = OTHER; note = adenosine-3'-phosphate
  modified_base 13: mod_base = OTHER; note = 2'-O-methyluridine-3'-phosphate
  modified_base 14: mod_base = OTHER; note = 2'-O-methyluridine-3'-phosphate
  modified_base 15: mod_base = OTHER; note = 2'-O-methylcytidine-3'-phosphate
  modified_base 16: mod_base = OTHER; note = guanosine-3'-phosphate
  modified_base 17: mod_base = OTHER; note = guanosine-3'-phosphate
  modified_base 18: mod_base = OTHER; note = adenosine-3'-phosphate
  modified_base 19: mod_base = OTHER; note = adenosine-3'-phosphate
  modified_base 20: mod_base = OTHER; note = 2'-deoxythymidine-3'-phosphorothioate
  misc_feature 1..19: note = RNA
  misc_feature 20..21: note = DNA
gcctggagtttattcggaatt

SEQ ID NO: 462 - DNA, 20 bp, synthetic construct
  source 1..20: mol_type = other DNA
  modified_base 1: mod_base = OTHER; note = uridine-3'-phosphate
  modified_base 2: mod_base = OTHER; note = uridine-3'-phosphate
  modified_base 3: mod_base = OTHER; note = cytidine-3'-phosphate
  modified_base 4: mod_base = OTHER; note = cytidine-3'-phosphate
  modified_base 5: mod_base = OTHER; note = guanosine-3'-phosphate
  modified_base 6: mod_base = OTHER; note = adenosine-3'-phosphate
  modified_base 7: mod_base = OTHER; note = adenosine-3'-phosphate
  modified_base 8: mod_base = OTHER; note = uridine-3'-phosphate
  modified_base 9: mod_base = OTHER; note = adenosine-3'-phosphate
  modified_base 10: mod_base = OTHER; note = adenosine-3'-phosphate
  modified_base 11: mod_base = OTHER; note = cytidine-3'-phosphate
  modified_base 12: mod_base = OTHER; note = uridine-3'-phosphate
  modified_base 13: mod_base = OTHER; note = cytidine-3'-phosphate
  modified_base 14: mod_base = OTHER; note = cytidine-3'-phosphate
  modified_base 15: mod_base = OTHER; note = adenosine-3'-phosphate
  modified_base 16: mod_base = OTHER; note = guanosine-3'-phosphate
  modified_base 17: mod_base = OTHER; note = guanosine-3'-phosphate
  modified_base 18: mod_base = OTHER; note = cytidine-3'-phosphate
  modified_base 19: mod_base = OTHER; note = 2'-deoxythymidine-3'-phosphorothioate
  misc_feature 1..18: note = RNA
  misc_feature 19..20: note = DNA
ttccgaataactccaggctt

SEQ ID NO: 463 - DNA, 21 bp, synthetic construct
  source 1..21: mol_type = other DNA
  modified_base 1: mod_base = OTHER; note = cytidine-3'-phosphate
  modified_base 2: mod_base = OTHER; note = uridine-3'-phosphate
  modified_base 3: mod_base = OTHER; note = guanosine-3'-phosphate
  modified_base 4: mod_base = OTHER; note = guanosine-3'-phosphate
  modified_base 5: mod_base = OTHER; note = adenosine-3'-phosphate
  modified_base 6: mod_base = OTHER; note = guanosine-3'-phosphate
  modified_base 7: mod_base = OTHER; note = uridine-3'-phosphate
  modified_base 8: mod_base = OTHER; note = uridine-3'-phosphate
  modified_base 9: mod_base = OTHER; note = uridine-3'-phosphate
  modified_base 10: mod_base = OTHER; note = adenosine-3'-phosphate
  modified_base 11: mod_base = OTHER; note = uridine-3'-phosphate
  modified_base 12: mod_base = OTHER; note = uridine-3'-phosphate
  modified_base 13: mod_base = OTHER; note = cytidine-3'-phosphate
  modified_base 14: mod_base = OTHER; note = guanosine-3'-phosphate
  modified_base 15: mod_base = OTHER; note = guanosine-3'-phosphate
  modified_base 16: mod_base = OTHER; note = adenosine-3'-phosphate
  modified_base 17: mod_base = OTHER; note = adenosine-3'-phosphate
  modified_base 18: mod_base = OTHER; note = adenosine-3'-phosphate
  modified_base 19: mod_base = OTHER; note = adenosine-3'-phosphate
  modified_base 20: mod_base = OTHER; note = 2'-deoxythymidine-3'-phosphorothioate
  misc_feature 1..19: note = RNA
  misc_feature 20..21: note = DNA
ctggagtttattcggaaaatt

SEQ ID NO: 464 - DNA, 21 bp, synthetic construct
  source 1..21: mol_type = other DNA
  modified_base 1: mod_base = OTHER; note = uridine-3'-phosphate
  modified_base 2: mod_base = OTHER; note = uridine-3'-phosphate
  modified_base 3: mod_base = OTHER; note = uridine-3'-phosphate
  modified_base 4: mod_base = OTHER; note = uridine-3'-phosphate
  modified_base 5: mod_base = OTHER; note = cytidine-3'-phosphate
  modified_base 6: mod_base = OTHER; note = cytidine-3'-phosphate
  modified_base 7: mod_base = OTHER; note = guanosine-3'-phosphate
  modified_base 8: mod_base = OTHER; note = adenosine-3'-phosphate
  modified_base 9: mod_base = OTHER; note = adenosine-3'-phosphate
  modified_base 10: mod_base = OTHER; note = uridine-3'-phosphate
  modified_base 11: mod_base = OTHER; note = adenosine-3'-phosphate
  modified_base 12: mod_base = OTHER; note = adenosine-3'-phosphate
  modified_base 13: mod_base = OTHER; note = adenosine-3'-phosphate
  modified_base 14: mod_base = OTHER; note = cytidine-3'-phosphate
  modified_base 15: mod_base = OTHER; note = uridine-3'-phosphate
  modified_base 16: mod_base = OTHER; note = cytidine-3'-phosphate
  modified_base 17: mod_base = OTHER; note = cytidine-3'-phosphate
  modified_base 18: mod_base = OTHER; note = adenosine-3'-phosphate
  modified_base 19: mod_base = OTHER; note = guanosine-3'-phosphate
  modified_base 20: mod_base = OTHER; note = 2'-deoxythymidine-3'-phosphorothioate
  misc_feature 1..19: note = RNA
  misc_feature 20..21: note = DNA
ttttccgaataaactccagtt

SEQ ID NO: 465 - DNA, 21 bp, synthetic construct
  source 1..21: mol_type = other DNA
  modified_base 1: mod_base = OTHER; note = 2'-O-methylcytidine-3'-phosphate
  modified_base 2: mod_base = OTHER; note = 2'-O-methyluridine-3'-phosphate
  modified_base 3: mod_base = OTHER; note = guanosine-3'-phosphate
  modified_base 4: mod_base = OTHER; note = guanosine-3'-phosphate
  modified_base 5: mod_base = OTHER; note = adenosine-3'-phosphate
  modified_base 6: mod_base = OTHER; note = guanosine-3'-phosphate
  modified_base 7: mod_base = OTHER; note = 2'-O-methyluridine-3'-phosphate
  modified_base 8: mod_base = OTHER; note = 2'-O-methyluridine-3'-phosphate
  modified_base 9: mod_base = OTHER; note = 2'-O-methyluridine-3'-phosphate
  modified_base 10: mod_base = OTHER; note = adenosine-3'-phosphate
  modified_base 11: mod_base = OTHER; note = 2'-O-methyluridine-3'-phosphate
  modified_base 12: mod_base = OTHER; note = 2'-O-methyluridine-3'-phosphate
  modified_base 13: mod_base = OTHER; note = 2'-O-methylcytidine-3'-phosphate
  modified_base 14: mod_base = OTHER; note = guanosine-3'-phosphate
  modified_base 15: mod_base = OTHER; note = guanosine-3'-phosphate
  modified_base 16: mod_base = OTHER; note = adenosine-3'-phosphate
  modified_base 17: mod_base = OTHER; note = adenosine-3'-phosphate
  modified_base 18: mod_base = OTHER; note = adenosine-3'-phosphate
  modified_base 19: mod_base = OTHER; note = adenosine-3'-phosphate
  modified_base 20: mod_base = OTHER; note = 2'-deoxythymidine-3'-phosphorothioate
  misc_feature 1..19: note = RNA
  misc_feature 20..21: note = DNA
ctggagtttattcggaaaatt

SEQ ID NO: 466 - DNA, 21 bp, synthetic construct
  source 1..21: mol_type = other DNA
  modified_base 1: mod_base = OTHER; note = uridine-3'-phosphate
  modified_base 2: mod_base = OTHER; note = uridine-3'-phosphate
  modified_base 3: mod_base = OTHER; note = uridine-3'-phosphate
  modified_base 4: mod_base = OTHER; note = uridine-3'-phosphate
  modified_base 5: mod_base = OTHER; note = cytidine-3'-phosphate
  modified_base 6: mod_base = OTHER; note = cytidine-3'-phosphate
  modified_base 7: mod_base = OTHER; note = guanosine-3'-phosphate
  modified_base 8: mod_base = OTHER; note = adenosine-3'-phosphate
  modified_base 9: mod_base = OTHER; note = adenosine-3'-phosphate
  modified_base 10: mod_base = OTHER; note = 2'-O-methyluridine-3'-phosphate
  modified_base 11: mod_base = OTHER; note = adenosine-3'-phosphate
  modified_base 12: mod_base = OTHER; note = adenosine-3'-phosphate
  modified_base 13: mod_base = OTHER; note = adenosine-3'-phosphate
  modified_base 14: mod_base = OTHER; note = cytidine-3'-phosphate
  modified_base 15: mod_base = OTHER; note = uridine-3'-phosphate
  modified_base 16: mod_base = OTHER; note = cytidine-3'-phosphate
  modified_base 17: mod_base = OTHER; note = 2'-O-methylcytidine-3'-phosphate
  modified_base 18: mod_base = OTHER; note = adenosine-3'-phosphate
  modified_base 19: mod_base = OTHER; note = guanosine-3'-phosphate
  modified_base 20: mod_base = OTHER; note = 2'-deoxythymidine-3'-phosphorothioate
  misc_feature 1..19: note = RNA
  misc_feature 20..21: note = DNA
ttttccgaataaactccagtt

SEQ ID NO: 467 - DNA, 21 bp, synthetic construct
  source 1..21: mol_type = other DNA
  modified_base 1: mod_base = OTHER; note = guanosine-3'-phosphate
  modified_base 2: mod_base = OTHER; note = guanosine-3'-phosphate
  modified_base 3: mod_base = OTHER; note = adenosine-3'-phosphate
  modified_base 4: mod_base = OTHER; note = guanosine-3'-phosphate
  modified_base 5: mod_base = OTHER; note = uridine-3'-phosphate
  modified_base 6: mod_base = OTHER; note = uridine-3'-phosphate
  modified_base 7: mod_base = OTHER; note = uridine-3'-phosphate
  modified_base 8: mod_base = OTHER; note = adenosine-3'-phosphate
  modified_base 9: mod_base = OTHER; note = uridine-3'-phosphate
  modified_base 10: mod_base = OTHER; note = uridine-3'-phosphate
  modified_base 11: mod_base = OTHER; note = cytidine-3'-phosphate
  modified_base 12: mod_base = OTHER; note = guanosine-3'-phosphate
  modified_base 13: mod_base = OTHER; note = guanosine-3'-phosphate
  modified_base 14: mod_base = OTHER; note = adenosine-3'-phosphate
  modified_base 15: mod_base = OTHER; note = adenosine-3'-phosphate
  modified_base 16: mod_base = OTHER; note = adenosine-3'-phosphate
  modified_base 17: mod_base = OTHER; note = adenosine-3'-phosphate
  modified_base 18: mod_base = OTHER; note = guanosine-3'-phosphate
  modified_base 19: mod_base = OTHER; note = cytidine-3'-phosphate
  modified_base 20: mod_base = OTHER; note = 2'-deoxythymidine-3'-phosphorothioate
  misc_feature 1..19: note = RNA
  misc_feature 20..21: note = DNA
ggagtttattcggaaaagctt

SEQ ID NO: 468 - DNA, 21 bp, synthetic construct
  source 1..21: mol_type = other DNA
  modified_base 1: mod_base = OTHER; note = guanosine-3'-phosphate
  modified_base 2: mod_base = OTHER; note = cytidine-3'-phosphate
  modified_base 3: mod_base = OTHER; note = uridine-3'-phosphate
  modified_base 4: mod_base = OTHER; note = uridine-3'-phosphate
  modified_base 5: mod_base = OTHER; note = uridine-3'-phosphate
  modified_base 6: mod_base = OTHER; note = uridine-3'-phosphate
  modified_base 7: mod_base = OTHER; note = cytidine-3'-phosphate
  modified_base 8: mod_base = OTHER; note = cytidine-3'-phosphate
  modified_base 9: mod_base = OTHER; note = guanosine-3'-phosphate
  modified_base 10: mod_base = OTHER; note = adenosine-3'-phosphate
  modified_base 11: mod_base = OTHER; note = adenosine-3'-phosphate
  modified_base 12: mod_base = OTHER; note = uridine-3'-phosphate
  modified_base 13: mod_base = OTHER; note = adenosine-3'-phosphate
  modified_base 14: mod_base = OTHER; note = adenosine-3'-phosphate
  modified_base 15: mod_base = OTHER; note = adenosine-3'-phosphate
  modified_base 16: mod_base = OTHER; note = cytidine-3'-phosphate
  modified_base 17: mod_base = OTHER; note = uridine-3'-phosphate
  modified_base 18: mod_base = OTHER; note = cytidine-3'-phosphate
  modified_base 19: mod_base = OTHER; note = cytidine-3'-phosphate
  modified_base 20: mod_base = OTHER; note = 2'-deoxythymidine-3'-phosphorothioate
  misc_feature 1..19: note = RNA
  misc_feature 20..21: note = DNA
gcttttccgaataaactcctt

SEQ ID NO: 469 - DNA, 21 bp, synthetic construct
  source 1..21: mol_type = other DNA
  modified_base 1: mod_base = OTHER; note = guanosine-3'-phosphate
  modified_base 2: mod_base = OTHER; note = guanosine-3'-phosphate
  modified_base 3: mod_base = OTHER; note = adenosine-3'-phosphate
  modified_base 4: mod_base = OTHER; note = guanosine-3'-phosphate
  modified_base 5: mod_base = OTHER; note = 2'-O-methyluridine-3'-phosphate
  modified_base 6: mod_base = OTHER; note = 2'-O-methyluridine-3'-phosphate
  modified_base 7: mod_base = OTHER; note = 2'-O-methyluridine-3'-phosphate
  modified_base 8: mod_base = OTHER; note = adenosine-3'-phosphate
  modified_base 9: mod_base = OTHER; note = 2'-O-methyluridine-3'-phosphate
  modified_base 10: mod_base = OTHER; note = 2'-O-methyluridine-3'-phosphate
  modified_base 11: mod_base = OTHER; note = 2'-O-methylcytidine-3'-phosphate
  modified_base 12: mod_base = OTHER; note = guanosine-3'-phosphate
  modified_base 13: mod_base = OTHER; note = guanosine-3'-phosphate
  modified_base 14: mod_base = OTHER; note = adenosine-3'-phosphate
  modified_base 15: mod_base = OTHER; note = adenosine-3'-phosphate
  modified_base 16: mod_base = OTHER; note = adenosine-3'-phosphate
  modified_base 17: mod_base = OTHER; note = adenosine-3'-phosphate
  modified_base 18: mod_base = OTHER; note = guanosine-3'-phosphate
  modified_base 19: mod_base = OTHER; note = 2'-O-methylcytidine-3'-phosphate
  modified_base 20: mod_base = OTHER; note = 2'-deoxythymidine-3'-phosphorothioate
  misc_feature 1..19: note = RNA
  misc_feature 20..21: note = DNA
ggagtttattcggaaaagctt

SEQ ID NO: 470 - DNA, 21 bp, synthetic construct
  source 1..21: mol_type = other DNA
  modified_base 1: mod_base = OTHER; note = guanosine-3'-phosphate
  modified_base 2: mod_base = OTHER; note = cytidine-3'-phosphate
  modified_base 3: mod_base = OTHER; note = uridine-3'-phosphate
  modified_base 4: mod_base = OTHER; note = uridine-3'-phosphate
  modified_base 5: mod_base = OTHER; note = uridine-3'-phosphate
  modified_base 6: mod_base = OTHER; note = uridine-3'-phosphate
  modified_base 7: mod_base = OTHER; note = cytidine-3'-phosphate
  modified_base 8: mod_base = OTHER; note = cytidine-3'-phosphate
  modified_base 9: mod_base = OTHER; note = guanosine-3'-phosphate
  modified_base 10: mod_base = OTHER; note = adenosine-3'-phosphate
  modified_base 11: mod_base = OTHER; note = adenosine-3'-phosphate
  modified_base 12: mod_base = OTHER; note = 2'-O-methyluridine-3'-phosphate
  modified_base 13: mod_base = OTHER; note = adenosine-3'-phosphate
  modified_base 14: mod_base = OTHER; note = adenosine-3'-phosphate
  modified_base 15: mod_base = OTHER; note = adenosine-3'-phosphate
  modified_base 16: mod_base = OTHER; note = cytidine-3'-phosphate
  modified_base 17: mod_base = OTHER; note = uridine-3'-phosphate
  modified_base 18: mod_base = OTHER; note = cytidine-3'-phosphate
  modified_base 19: mod_base = OTHER; note = cytidine-3'-phosphate
  modified_base 20: mod_base = OTHER; note = 2'-deoxythymidine-3'-phosphorothioate
  misc_feature 1..19: note = RNA
  misc_feature 20..21: note = DNA
gcttttccgaataaactcctt

SEQ ID NO: 471 - DNA, 21 bp, synthetic construct
  source 1..21: mol_type = other DNA
  modified_base 1: mod_base = OTHER; note = guanosine-3'-phosphate
  modified_base 2: mod_base = OTHER; note = adenosine-3'-phosphate
  modified_base 3: mod_base = OTHER; note = guanosine-3'-phosphate
  modified_base 4: mod_base = OTHER; note = uridine-3'-phosphate
  modified_base 5: mod_base = OTHER; note = uridine-3'-phosphate
  modified_base 6: mod_base = OTHER; note = uridine-3'-phosphate
  modified_base 7: mod_base = OTHER; note = adenosine-3'-phosphate
  modified_base 8: mod_base = OTHER; note = uridine-3'-phosphate
  modified_base 9: mod_base = OTHER; note = uridine-3'-phosphate
  modified_base 10: mod_base = OTHER; note = cytidine-3'-phosphate
  modified_base 11: mod_base = OTHER; note = guanosine-3'-phosphate
  modified_base 12: mod_base = OTHER; note = guanosine-3'-phosphate
  modified_base 13: mod_base = OTHER; note = adenosine-3'-phosphate
  modified_base 14: mod_base = OTHER; note = adenosine-3'-phosphate
  modified_base 15: mod_base = OTHER; note = adenosine-3'-phosphate
  modified_base 16: mod_base = OTHER; note = adenosine-3'-phosphate
  modified_base 17: mod_base = OTHER; note = guanosine-3'-phosphate
  modified_base 18: mod_base = OTHER; note = cytidine-3'-phosphate
  modified_base 19: mod_base = OTHER; note = cytidine-3'-phosphate
  modified_base 20: mod_base = OTHER; note = 2'-deoxythymidine-3'-phosphorothioate
  misc_feature 1..19: note = RNA
  misc_feature 20..21: note = DNA
gagtttattcggaaaagcctt

SEQ ID NO: 472 - DNA, 21 bp, synthetic construct
  source 1..21: mol_type = other DNA
  modified_base 1: mod_base = OTHER; note = guanosine-3'-phosphate
  modified_base 2: mod_base = OTHER; note = guanosine-3'-phosphate
  modified_base 3: mod_base = OTHER; note = cytidine-3'-phosphate
  modified_base 4: mod_base = OTHER; note = uridine-3'-phosphate
  modified_base 5: mod_base = OTHER; note = uridine-3'-phosphate
  modified_base 6: mod_base = OTHER; note = uridine-3'-phosphate
  modified_base 7: mod_base = OTHER; note = uridine-3'-phosphate
  modified_base 8: mod_base = OTHER; note = cytidine-3'-phosphate
  modified_base 9: mod_base = OTHER; note = cytidine-3'-phosphate
  modified_base 10: mod_base = OTHER; note = guanosine-3'-phosphate
  modified_base 11: mod_base = OTHER; note = adenosine-3'-phosphate
  modified_base 12: mod_base = OTHER; note = adenosine-3'-phosphate
  modified_base 13: mod_base = OTHER; note = uridine-3'-phosphate
  modified_base 14: mod_base = OTHER; note = adenosine-3'-phosphate
  modified_base 15: mod_base = OTHER; note = adenosine-3'-phosphate
  modified_base 16: mod_base = OTHER; note = adenosine-3'-phosphate
  modified_base 17: mod_base = OTHER; note = cytidine-3'-phosphate
  modified_base 18: mod_base = OTHER; note = uridine-3'-phosphate
  modified_base 19: mod_base = OTHER; note = cytidine-3'-phosphate
  modified_base 20: mod_base = OTHER; note = 2'-deoxythymidine-3'-phosphorothioate
  misc_feature 1..19: note = RNA
  misc_feature 20..21: note = DNA
ggcttttccgaataaactctt

SEQ ID NO: 473 - DNA, 21 bp, synthetic construct
  source 1..21: mol_type = other DNA
  modified_base 1: mod_base = OTHER; note = guanosine-3'-phosphate
  modified_base 2: mod_base = OTHER; note = adenosine-3'-phosphate
  modified_base 3: mod_base = OTHER; note = guanosine-3'-phosphate
  modified_base 4: mod_base = OTHER; note = 2'-O-methyluridine-3'-phosphate
  modified_base 5: mod_base = OTHER; note = 2'-O-methyluridine-3'-phosphate
  modified_base 6: mod_base = OTHER; note = 2'-O-methyluridine-3'-phosphate
  modified_base 7: mod_base = OTHER; note = adenosine-3'-phosphate
  modified_base 8: mod_base = OTHER; note = 2'-O-methyluridine-3'-phosphate
  modified_base 9: mod_base = OTHER; note = 2'-O-methyluridine-3'-phosphate
  modified_base 10: mod_base = OTHER; note = 2'-O-methylcytidine-3'-phosphate
  modified_base 11: mod_base = OTHER; note = guanosine-3'-phosphate
  modified_base 12: mod_base = OTHER; note = guanosine-3'-phosphate
  modified_base 13: mod_base = OTHER; note = adenosine-3'-phosphate
  modified_base 14: mod_base = OTHER; note = adenosine-3'-phosphate
  modified_base 15: mod_base = OTHER; note = adenosine-3'-phosphate
  modified_base 16: mod_base = OTHER; note = adenosine-3'-phosphate
  modified_base 17: mod_base = OTHER; note = guanosine-3'-phosphate
  modified_base 18: mod_base = OTHER; note = 2'-O-methylcytidine-3'-phosphate
  modified_base 19: mod_base = OTHER; note = 2'-O-methylcytidine-3'-phosphate
  modified_base 20: mod_base = OTHER; note = 2'-deoxythymidine-3'-phosphorothioate
  misc_feature 1..19: note = RNA
  misc_feature 20..21: note = DNA
gagtttattcggaaaagcctt

SEQ ID NO: 474 - DNA, 21 bp, synthetic construct
  source 1..21: mol_type = other DNA
  modified_base 1: mod_base = OTHER; note = guanosine-3'-phosphate
  modified_base 2: mod_base = OTHER; note = guanosine-3'-phosphate
  modified_base 3: mod_base = OTHER; note = cytidine-3'-phosphate
  modified_base 4: mod_base = OTHER; note = uridine-3'-phosphate
  modified_base 5: mod_base = OTHER; note = uridine-3'-phosphate
  modified_base 6: mod_base = OTHER; note = uridine-3'-phosphate
  modified_base 7: mod_base = OTHER; note = uridine-3'-phosphate
  modified_base 8: mod_base = OTHER; note = cytidine-3'-phosphate
  modified_base 9: mod_base = OTHER; note = cytidine-3'-phosphate
  modified_base 10: mod_base = OTHER; note = guanosine-3'-phosphate
  modified_base 11: mod_base = OTHER; note = adenosine-3'-phosphate
  modified_base 12: mod_base = OTHER; note = adenosine-3'-phosphate
  modified_base 13: mod_base = OTHER; note = 2'-O-methyluridine-3'-phosphate
  modified_base 14: mod_base = OTHER; note = adenosine-3'-phosphate
  modified_base 15: mod_base = OTHER; note = adenosine-3'-phosphate
  modified_base 16: mod_base = OTHER; note = adenosine-3'-phosphate
  modified_base 17: mod_base = OTHER; note = cytidine-3'-phosphate
  modified_base 18: mod_base = OTHER; note = uridine-3'-phosphate
  modified_base 19: mod_base = OTHER; note = cytidine-3'-phosphate
  modified_base 20: mod_base = OTHER; note = 2'-deoxythymidine-3'-phosphorothioate
  misc_feature 1..19: note = RNA
  misc_feature 20..21: note = DNA
ggcttttccgaataaactctt

SEQ ID NO: 475 - DNA, 21 bp, synthetic construct
  source 1..21: mol_type = other DNA
  modified_base 1: mod_base = OTHER; note = uridine-3'-phosphate
  modified_base 2: mod_base = OTHER; note = uridine-3'-phosphate
  modified_base 3: mod_base = OTHER; note = adenosine-3'-phosphate
  modified_base 4: mod_base = OTHER; note = uridine-3'-phosphate
  modified_base 5: mod_base = OTHER; note = uridine-3'-phosphate
  modified_base 6: mod_base = OTHER; note = cytidine-3'-phosphate
  modified_base 7: mod_base = OTHER; note = guanosine-3'-phosphate
  modified_base 8: mod_base = OTHER; note = guanosine-3'-phosphate
  modified_base 9: mod_base = OTHER; note = adenosine-3'-phosphate
  modified_base 10: mod_base = OTHER; note = adenosine-3'-phosphate
  modified_base 11: mod_base = OTHER; note = adenosine-3'-phosphate
  modified_base 12: mod_base = OTHER; note = adenosine-3'-phosphate
  modified_base 13: mod_base = OTHER; note = guanosine-3'-phosphate
  modified_base 14: mod_base = OTHER; note = cytidine-3'-phosphate
  modified_base 15: mod_base = OTHER; note = cytidine-3'-phosphate
  modified_base 16: mod_base = OTHER; note = adenosine-3'-phosphate
  modified_base 17: mod_base = OTHER; note = guanosine-3'-phosphate
  modified_base 18: mod_base = OTHER; note = cytidine-3'-phosphate
  modified_base 19: mod_base = OTHER; note = uridine-3'-phosphate
  modified_base 20: mod_base = OTHER; note = 2'-deoxythymidine-3'-phosphorothioate
  misc_feature 1..19: note = RNA
  misc_feature 20..21: note = DNA
ttattcggaaaagccagcttt

SEQ ID NO: 476 - DNA, 21 bp, synthetic construct
  source 1..21: mol_type = other DNA
  modified_base 1: mod_base = OTHER; note = adenosine-3'-phosphate
  modified_base 2: mod_base = OTHER; note = guanosine-3'-phosphate
  modified_base 3: mod_base = OTHER; note = cytidine-3'-phosphate
  modified_base 4: mod_base = OTHER; note = uridine-3'-phosphate
  modified_base 5: mod_base = OTHER; note = guanosine-3'-phosphate
  modified_base 6: mod_base = OTHER; note = guanosine-3'-phosphate
  modified_base 7: mod_base = OTHER; note = cytidine-3'-phosphate
  modified_base 8: mod_base = OTHER; note = uridine-3'-phosphate
  modified_base 9: mod_base = OTHER; note = uridine-3'-phosphate
  modified_base 10: mod_base = OTHER; note = uridine-3'-phosphate
  modified_base 11: mod_base = OTHER; note = uridine-3'-phosphate
  modified_base 12: mod_base = OTHER; note = cytidine-3'-phosphate
  modified_base 13: mod_base = OTHER; note = cytidine-3'-phosphate
  modified_base 14: mod_base = OTHER; note = guanosine-3'-phosphate
  modified_base 15: mod_base = OTHER; note = adenosine-3'-phosphate
  modified_base 16: mod_base = OTHER; note = adenosine-3'-phosphate
  modified_base 17: mod_base = OTHER; note = uridine-3'-phosphate
  modified_base 18: mod_base = OTHER; note = adenosine-3'-phosphate
  modified_base 19: mod_base = OTHER; note = adenosine-3'-phosphate
  modified_base 20: mod_base = OTHER; note = 2'-deoxythymidine-3'-phosphorothioate
  misc_feature 1..19: note = RNA
  misc_feature 20..21: note = DNA
agctggcttttccgaataatt

SEQ ID NO: 477 - DNA, 21 bp, synthetic construct
  source 1..21: mol_type = other DNA
  modified_base 1: mod_base = OTHER; note = 2'-O-methyluridine-3'-phosphate
  modified_base 2: mod_base = OTHER; note = 2'-O-methyluridine-3'-phosphate
  modified_base 3: mod_base = OTHER; note = adenosine-3'-phosphate
  modified_base 4: mod_base = OTHER; note = 2'-O-methyluridine-3'-phosphate
  modified_base 5: mod_base = OTHER; note = 2'-O-methyluridine-3'-phosphate
  modified_base 6: mod_base = OTHER; note = 2'-O-methylcytidine-3'-phosphate
  modified_base 7: mod_base = OTHER; note = guanosine-3'-phosphate
  modified_base 8: mod_base = OTHER; note = guanosine-3'-phosphate
  modified_base 9: mod_base = OTHER; note = adenosine-3'-phosphate
  modified_base 10: mod_base = OTHER; note = adenosine-3'-phosphate
  modified_base 11: mod_base = OTHER; note = adenosine-3'-phosphate
  modified_base 12: mod_base = OTHER; note = adenosine-3'-phosphate
  modified_base 13: mod_base = OTHER; note = guanosine-3'-phosphate
  modified_base 14: mod_base = OTHER; note = 2'-O-methylcytidine-3'-phosphate
  modified_base 15: mod_base = OTHER; note = 2'-O-methylcytidine-3'-phosphate
  modified_base 16: mod_base = OTHER; note = adenosine-3'-phosphate
  modified_base 17: mod_base = OTHER; note = guanosine-3'-phosphate
  modified_base 18: mod_base = OTHER; note = 2'-O-methylcytidine-3'-phosphate
  modified_base 19: mod_base = OTHER; note = 2'-O-methyluridine-3'-phosphate
  modified_base 20: mod_base = OTHER; note = 2'-deoxythymidine-3'-phosphorothioate
  misc_feature 1..19: note = RNA
  misc_feature 20..21: note = DNA
ttattcggaaaagccagcttt

SEQ ID NO: 478 - DNA, 21 bp, synthetic construct
  source 1..21: mol_type = other DNA
  modified_base 1: mod_base = OTHER; note = adenosine-3'-phosphate
  modified_base 2: mod_base = OTHER; note = guanosine-3'-phosphate
  modified_base 3: mod_base = OTHER; note = cytidine-3'-phosphate
  modified_base 4: mod_base = OTHER; note = uridine-3'-phosphate
  modified_base 5: mod_base = OTHER; note = guanosine-3'-phosphate
  modified_base 6: mod_base = OTHER; note = guanosine-3'-phosphate
  modified_base 7: mod_base = OTHER; note = cytidine-3'-phosphate
  modified_base 8: mod_base = OTHER; note = uridine-3'-phosphate
  modified_base 9: mod_base = OTHER; note = uridine-3'-phosphate
  modified_base 10: mod_base = OTHER; note = uridine-3'-phosphate
  modified_base 11: mod_base = OTHER; note = uridine-3'-phosphate
  modified_base 12: mod_base = OTHER; note = cytidine-3'-phosphate
  modified_base 13: mod_base = OTHER; note = cytidine-3'-phosphate
  modified_base 14: mod_base = OTHER; note = guanosine-3'-phosphate
  modified_base 15: mod_base = OTHER; note = adenosine-3'-phosphate
  modified_base 16: mod_base = OTHER; note = adenosine-3'-phosphate
  modified_base 17: mod_base = OTHER; note = 2'-O-methyluridine-3'-phosphate
  modified_base 18: mod_base = OTHER; note = adenosine-3'-phosphate
  modified_base 19: mod_base = OTHER; note = adenosine-3'-phosphate
  modified_base 20: mod_base = OTHER; note = 2'-deoxythymidine-3'-phosphorothioate
  misc_feature 1..19: note = RNA
  misc_feature 20..21: note = DNA
agctggcttttccgaataatt

SEQ ID NO: 479 - DNA, 21 bp, synthetic construct
  source 1..21: mol_type = other DNA
  modified_base 1: mod_base = OTHER; note = cytidine-3'-phosphate
  modified_base 2: mod_base = OTHER; note = cytidine-3'-phosphate
  modified_base 3: mod_base = OTHER; note = cytidine-3'-phosphate
  modified_base 4: mod_base = OTHER; note = uridine-3'-phosphate
  modified_base 5: mod_base = OTHER; note = guanosine-3'-phosphate
  modified_base 6: mod_base = OTHER; note = guanosine-3'-phosphate
  modified_base 7: mod_base = OTHER; note = cytidine-3'-phosphate
  modified_base 8: mod_base = OTHER; note = guanosine-3'-phosphate
  modified_base 9: mod_base = OTHER; note = guanosine-3'-phosphate
  modified_base 10: mod_base = OTHER; note = guanosine-3'-phosphate
  modified_base 11: mod_base = OTHER; note = uridine-3'-phosphate
  modified_base 12: mod_base = OTHER; note = guanosine-3'-phosphate
  modified_base 13: mod_base = OTHER; note = guanosine-3'-phosphate
  modified_base 14: mod_base = OTHER; note = guanosine-3'-phosphate
  modified_base 15: mod_base = OTHER; note = uridine-3'-phosphate
  modified_base 16: mod_base = OTHER; note = adenosine-3'-phosphate
  modified_base 17: mod_base = OTHER; note = cytidine-3'-phosphate
  modified_base 18: mod_base = OTHER; note = adenosine-3'-phosphate
  modified_base 19: mod_base = OTHER; note = guanosine-3'-phosphate
  modified_base 20: mod_base = OTHER; note = 2'-deoxythymidine-3'-phosphorothioate
  misc_feature 1..19: note = RNA
  misc_feature 20..21: note = DNA
ccctggcgggtgggtacagtt

SEQ ID NO: 480 - DNA, 21 bp, synthetic construct
  source 1..21: mol_type = other DNA
  modified_base 1: mod_base = OTHER; note = cytidine-3'-phosphate
  modified_base 2: mod_base = OTHER; note = uridine-3'-phosphate
  modified_base 3: mod_base = OTHER; note = guanosine-3'-phosphate
  modified_base 4: mod_base = OTHER; note = uridine-3'-phosphate
  modified_base 5: mod_base = OTHER; note = adenosine-3'-phosphate
  modified_base 6: mod_base = OTHER; note = cytidine-3'-phosphate
  modified_base 7: mod_base = OTHER; note = cytidine-3'-phosphate
  modified_base 8: mod_base = OTHER; note = cytidine-3'-phosphate
  modified_base 9: mod_base = OTHER; note = adenosine-3'-phosphate
  modified_base 10: mod_base = OTHER; note = cytidine-3'-phosphate
  modified_base 11: mod_base = OTHER; note = cytidine-3'-phosphate
  modified_base 12: mod_base = OTHER; note = cytidine-3'-phosphate
  modified_base 13: mod_base = OTHER; note = guanosine-3'-phosphate
  modified_base 14: mod_base = OTHER; note = cytidine-3'-phosphate
  modified_base 15: mod_base = OTHER; note = cytidine-3'-phosphate
  modified_base 16: mod_base = OTHER; note = adenosine-3'-phosphate
  modified_base 17: mod_base = OTHER; note = guanosine-3'-phosphate
  modified_base 18: mod_base = OTHER; note = guanosine-3'-phosphate
  modified_base 19: mod_base = OTHER; note = guanosine-3'-phosphate
  modified_base 20: mod_base = OTHER; note = 2'-deoxythymidine-3'-phosphorothioate
  misc_feature 1..19: note = RNA
  misc_feature 20..21: note = DNA
ctgtacccacccgccagggtt

SEQ ID NO: 481 - DNA, 21 bp, synthetic construct
  source 1..21: mol_type = other DNA
  modified_base 1: mod_base = OTHER; note = 2'-O-methylcytidine-3'-phosphate
  modified_base 2: mod_base = OTHER; note = 2'-O-methylcytidine-3'-phosphate
  modified_base 3: mod_base = OTHER; note = 2'-O-methylcytidine-3'-phosphate
  modified_base 4: mod_base = OTHER; note = 2'-O-methyluridine-3'-phosphate
  modified_base 5: mod_base = OTHER; note = guanosine-3'-phosphate
  modified_base 6: mod_base = OTHER; note = guanosine-3'-phosphate
  modified_base 7: mod_base = OTHER; note = 2'-O-methylcytidine-3'-phosphate
  modified_base 8: mod_base = OTHER; note = guanosine-3'-phosphate
  modified_base 9: mod_base = OTHER; note = guanosine-3'-phosphate
  modified_base 10: mod_base = OTHER; note = guanosine-3'-phosphate
  modified_base 11: mod_base = OTHER; note = 2'-O-methyluridine-3'-phosphate
  modified_base 12: mod_base = OTHER; note = guanosine-3'-phosphate
  modified_base 13: mod_base = OTHER; note = guanosine-3'-phosphate
  modified_base 14: mod_base = OTHER; note = guanosine-3'-phosphate
  modified_base 15: mod_base = OTHER; note = 2'-O-methyluridine-3'-phosphate
  modified_base 16: mod_base = OTHER; note = adenosine-3'-phosphate
  modified_base 17: mod_base = OTHER; note = 2'-O-methylcytidine-3'-phosphate
  modified_base 18: mod_base = OTHER; note = adenosine-3'-phosphate
  modified_base 19: mod_base = OTHER; note = guanosine-3'-phosphate
  modified_base 20: mod_base = OTHER; note = 2'-deoxythymidine-3'-phosphorothioate
  misc_feature 1..19: note = RNA
  misc_feature 20..21: note = DNA
ccctggcgggtgggtacagtt

SEQ ID NO: 482 - DNA, 21 bp, synthetic construct
  source 1..21: mol_type = other DNA
  modified_base 1: mod_base = OTHER; note = cytidine-3'-phosphate
  modified_base 2: mod_base = OTHER; note = uridine-3'-phosphate
  modified_base 3: mod_base = OTHER; note = guanosine-3'-phosphate
  modified_base 4: mod_base = OTHER; note = 2'-O-methyluridine-3'-phosphate
  modified_base 5: mod_base = OTHER; note = adenosine-3'-phosphate
  modified_base 6: mod_base = OTHER; note = cytidine-3'-phosphate
  modified_base 7: mod_base = OTHER; note = cytidine-3'-phosphate
  modified_base 8: mod_base = OTHER; note = 2'-O-methylcytidine-3'-phosphate
  modified_base 9: mod_base = OTHER; note = adenosine-3'-phosphate
  modified_base 10: mod_base = OTHER; note = cytidine-3'-phosphate
  modified_base 11: mod_base = OTHER; note = cytidine-3'-phosphate
  modified_base 12: mod_base = OTHER; note = cytidine-3'-phosphate
  modified_base 13: mod_base = OTHER; note = guanosine-3'-phosphate
  modified_base 14: mod_base = OTHER; note = cytidine-3'-phosphate
  modified_base 15: mod_base = OTHER; note = 2'-O-methylcytidine-3'-phosphate
  modified_base 16: mod_base = OTHER; note = adenosine-3'-phosphate
  modified_base 17: mod_base = OTHER; note = guanosine-3'-phosphate
  modified_base 18: mod_base = OTHER; note = guanosine-3'-phosphate
  modified_base 19: mod_base = OTHER; note = guanosine-3'-phosphate
  modified_base 20: mod_base = OTHER; note = 2'-deoxythymidine-3'-phosphorothioate
  misc_feature 1..19: note = RNA
  misc_feature 20..21: note = DNA
ctgtacccacccgccagggtt

SEQ ID NO: 483 - DNA, 21 bp, synthetic construct
  source 1..21: mol_type = other DNA
  modified_base 1: mod_base = OTHER; note = cytidine-3'-phosphate
  modified_base 2: mod_base = OTHER; note = cytidine-3'-phosphate
  modified_base 3: mod_base = OTHER; note = uridine-3'-phosphate
  modified_base 4: mod_base = OTHER; note = guanosine-3'-phosphate
  modified_base 5: mod_base = OTHER; note = guanosine-3'-phosphate
  modified_base 6: mod_base = OTHER; note = cytidine-3'-phosphate
  modified_base 7: mod_base = OTHER; note = guanosine-3'-phosphate
  modified_base 8: mod_base = OTHER; note = guanosine-3'-phosphate
  modified_base 9: mod_base = OTHER; note = guanosine-3'-phosphate
  modified_base 10: mod_base = OTHER; note = uridine-3'-phosphate
  modified_base 11: mod_base = OTHER; note = guanosine-3'-phosphate
  modified_base 12: mod_base = OTHER; note = guanosine-3'-phosphate
  modified_base 13: mod_base = OTHER; note = guanosine-3'-phosphate
  modified_base 14: mod_base = OTHER; note = uridine-3'-phosphate
  modified_base 15: mod_base = OTHER; note = adenosine-3'-phosphate
  modified_base 16: mod_base = OTHER; note = cytidine-3'-phosphate
  modified_base 17: mod_base = OTHER; note = adenosine-3'-phosphate
  modified_base 18: mod_base = OTHER; note = guanosine-3'-phosphate
  modified_base 19: mod_base = OTHER; note = cytidine-3'-phosphate
  misc_feature 1..19: note = RNA
  misc_feature 20..21: note = DNA
cctggcgggtgggtacagctt

SEQ ID NO: 484 - DNA, 21 bp, synthetic construct
  source 1..21: mol_type = other DNA
  modified_base 1: mod_base = OTHER; note = guanosine-3'-phosphate
  modified_base 2: mod_base = OTHER; note = cytidine-3'-phosphate
  modified_base 3: mod_base = OTHER; note = uridine-3'-phosphate
  modified_base 4: mod_base = OTHER; note = guanosine-3'-phosphate
  modified_base 5: mod_base = OTHER; note = uridine-3'-phosphate
  modified_base 6: mod_base = OTHER; note = adenosine-3'-phosphate
  modified_base 7: mod_base = OTHER; note = cytidine-3'-phosphate
  modified_base 8: mod_base = OTHER; note = cytidine-3'-phosphate
  modified_base 9: mod_base = OTHER; note = cytidine-3'-phosphate
  modified_base 10: mod_base = OTHER; note = adenosine-3'-phosphate
  modified_base 11: mod_base = OTHER; note = cytidine-3'-phosphate
  modified_base 12: mod_base = OTHER; note = cytidine-3'-phosphate
  modified_base 13: mod_base = OTHER; note = cytidine-3'-phosphate
  modified_base 14: mod_base = OTHER; note = guanosine-3'-phosphate
  modified_base 15: mod_base = OTHER; note = cytidine-3'-phosphate
  modified_base 16: mod_base = OTHER; note = cytidine-3'-phosphate
  modified_base 17: mod_base = OTHER; note = adenosine-3'-phosphate
  modified_base 18: mod_base = OTHER; note = guanosine-3'-phosphate
  modified_base 19: mod_base = OTHER; note = guanosine-3'-phosphate
  misc_feature 1..19: note = RNA
  misc_feature 20..21: note = DNA
gctgtacccacccgccaggtt

SEQ ID NO: 485 - DNA, 21 bp, synthetic construct
  source 1..21: mol_type = other DNA
  modified_base 1: mod_base = OTHER; note = uridine-3'-phosphate
  modified_base 2: mod_base = OTHER; note = guanosine-3'-phosphate
  modified_base 3: mod_base = OTHER; note = guanosine-3'-phosphate
  modified_base 4: mod_base = OTHER; note = cytidine-3'-phosphate
  modified_base 5: mod_base = OTHER; note = guanosine-3'-phosphate
  modified_base 6: mod_base = OTHER; note = guanosine-3'-phosphate
  modified_base 7: mod_base = OTHER; note = guanosine-3'-phosphate
  modified_base 8: mod_base = OTHER; note = uridine-3'-phosphate
  modified_base 9: mod_base = OTHER; note = guanosine-3'-phosphate
  modified_base 10: mod_base = OTHER; note = guanosine-3'-phosphate
  modified_base 11: mod_base = OTHER; note = guanosine-3'-phosphate
  modified_base 12: mod_base = OTHER; note = uridine-3'-phosphate
  modified_base 13: mod_base = OTHER; note = adenosine-3'-phosphate
  modified_base 14: mod_base = OTHER; note = cytidine-3'-phosphate
  modified_base 15: mod_base = OTHER; note = adenosine-3'-phosphate
  modified_base 16: mod_base = OTHER; note = guanosine-3'-phosphate
  modified_base 17: mod_base = OTHER; note = cytidine-3'-phosphate
  modified_base 18: mod_base = OTHER; note = cytidine-3'-phosphate
  modified_base 19: mod_base = OTHER; note = guanosine-3'-phosphate
  modified_base 20: mod_base = OTHER; note = 2'-deoxythymidine-3'-phosphorothioate
  misc_feature 1..19: note = RNA
  misc_feature 20..21: note = DNA
tggcgggtgggtacagccgtt

SEQ ID NO: 486 - DNA, 21 bp, synthetic construct
  source 1..21: mol_type = other DNA
  modified_base 1: mod_base = OTHER; note = cytidine-3'-phosphate
  modified_base 2: mod_base = OTHER; note = guanosine-3'-phosphate
  modified_base 3: mod_base = OTHER; note = guanosine-3'-phosphate
  modified_base 4: mod_base = OTHER; note = cytidine-3'-phosphate
  modified_base 5: mod_base = OTHER; note = uridine-3'-phosphate
  modified_base 6: mod_base = OTHER; note = guanosine-3'-phosphate
  modified_base 7: mod_base = OTHER; note = uridine-3'-phosphate
  modified_base 8: mod_base = OTHER; note = adenosine-3'-phosphate
  modified_base 9: mod_base = OTHER; note = cytidine-3'-phosphate
  modified_base 10: mod_base = OTHER; note = cytidine-3'-phosphate
  modified_base 11: mod_base = OTHER; note = cytidine-3'-phosphate
  modified_base 12: mod_base = OTHER; note = adenosine-3'-phosphate
  modified_base 13: mod_base = OTHER; note = cytidine-3'-phosphate
  modified_base 14: mod_base = OTHER; note = cytidine-3'-phosphate
  modified_base 15: mod_base = OTHER; note = cytidine-3'-phosphate
  modified_base 16: mod_base = OTHER; note = guanosine-3'-phosphate
  modified_base 17: mod_base = OTHER; note = cytidine-3'-phosphate
  modified_base 18: mod_base = OTHER; note = cytidine-3'-phosphate
  modified_base 19: mod_base = OTHER; note = adenosine-3'-phosphate
  modified_base 20: mod_base = OTHER; note = 2'-deoxythymidine-3'-phosphorothioate
  misc_feature 1..19: note = RNA
  misc_feature 20..21: note = DNA
cggctgtacccacccgccatt

SEQ ID NO: 487 - DNA, 21 bp, synthetic construct
  source 1..21: mol_type = other DNA
  modified_base 1: mod_base = OTHER; note = 2'-O-methyluridine-3'-phosphate
  modified_base 2: mod_base = OTHER; note = guanosine-3'-phosphate
  modified_base 3: mod_base = OTHER; note = guanosine-3'-phosphate
  modified_base 4: mod_base = OTHER; note = 2'-O-methylcytidine-3'-phosphate
  modified_base 5: mod_base = OTHER; note = guanosine-3'-phosphate
  modified_base 6: mod_base = OTHER; note = guanosine-3'-phosphate
  modified_base 7: mod_base = OTHER; note = guanosine-3'-phosphate
  modified_base 8: mod_base = OTHER; note = 2'-O-methyluridine-3'-phosphate
  modified_base 9: mod_base = OTHER; note = guanosine-3'-phosphate
  modified_base 10: mod_base = OTHER; note = guanosine-3'-phosphate
  modified_base 11: mod_base = OTHER; note = guanosine-3'-phosphate
  modified_base 12: mod_base = OTHER; note = 2'-O-methyluridine-3'-phosphate
  modified_base 13: mod_base = OTHER; note = adenosine-3'-phosphate
  modified_base 14: mod_base = OTHER; note = 2'-O-methylcytidine-3'-phosphate
  modified_base 15: mod_base = OTHER; note = adenosine-3'-phosphate
  modified_base 16: mod_base = OTHER; note = guanosine-3'-phosphate
  modified_base 17: mod_base = OTHER; note = 2'-O-methylcytidine-3'-phosphate
  modified_base 18: mod_base = OTHER; note = 2'-O-methylcytidine-3'-phosphate
  modified_base 19: mod_base = OTHER; note = guanosine-3'-phosphate
  modified_base 20: mod_base = OTHER; note = 2'-deoxythymidine-3'-phosphorothioate
  misc_feature 1..19: note = RNA
  misc_feature 20..21: note = DNA
tggcgggtgggtacagccgtt

SEQ ID NO: 488 - DNA, 21 bp, synthetic construct
  source 1..21: mol_type = other DNA
  modified_base 1: mod_base = OTHER; note = cytidine-3'-phosphate
  modified_base 2: mod_base = OTHER; note = guanosine-3'-phosphate
  modified_base 3: mod_base = OTHER; note = guanosine-3'-phosphate
  modified_base 4: mod_base = OTHER; note = cytidine-3'-phosphate
  modified_base 5: mod_base = OTHER; note = uridine-3'-phosphate
  modified_base 6: mod_base = OTHER; note = guanosine-3'-phosphate
  modified_base 7: mod_base = OTHER; note = 2'-O-methyluridine-3'-phosphate
  modified_base 8: mod_base = OTHER; note = adenosine-3'-phosphate
  modified_base 9: mod_base = OTHER; note = cytidine-3'-phosphate
  modified_base 10: mod_base = OTHER; note = cytidine-3'-phosphate
  modified_base 11: mod_base = OTHER; note = 2'-O-methylcytidine-3'-phosphate
  modified_base 12: mod_base = OTHER; note = adenosine-3'-phosphate
  modified_base 13: mod_base = OTHER; note = cytidine-3'-phosphate
  modified_base 14: mod_base = OTHER; note = cytidine-3'-phosphate
  modified_base 15: mod_base = OTHER; note = cytidine-3'-phosphate
  modified_base 16: mod_base = OTHER; note = guanosine-3'-phosphate
  modified_base 17: mod_base = OTHER; note = cytidine-3'-phosphate
  modified_base 18: mod_base = OTHER; note = 2'-O-methylcytidine-3'-phosphate
  modified_base 19: mod_base = OTHER; note = adenosine-3'-phosphate
  modified_base 20: mod_base = OTHER; note = 2'-deoxythymidine-3'-phosphorothioate
  misc_feature 1..19: note = RNA
  misc_feature 20..21: note = DNA
cggctgtacccacccgccatt

SEQ ID NO: 489 - DNA, 21 bp, synthetic construct
  source 1..21: mol_type = other DNA
  modified_base 1: mod_base = OTHER; note = guanosine-3'-phosphate
  modified_base 2: mod_base = OTHER; note = guanosine-3'-phosphate
  modified_base 3: mod_base = OTHER; note = cytidine-3'-phosphate
  modified_base 4: mod_base = OTHER; note = guanosine-3'-phosphate
  modified_base 5: mod_base = OTHER; note = guanosine-3'-phosphate
  modified_base 6: mod_base = OTHER; note = guanosine-3'-phosphate
  modified_base 7: mod_base = OTHER; note = uridine-3'-phosphate
  modified_base 8: mod_base = OTHER; note = guanosine-3'-phosphate
  modified_base 9: mod_base = OTHER; note = guanosine-3'-phosphate
  modified_base 10: mod_base = OTHER; note = guanosine-3'-phosphate
  modified_base 11: mod_base = OTHER; note = uridine-3'-phosphate
  modified_base 12: mod_base = OTHER; note = adenosine-3'-phosphate
  modified_base 13: mod_base = OTHER; note = cytidine-3'-phosphate
  modified_base 14: mod_base = OTHER; note = adenosine-3'-phosphate
  modified_base 15: mod_base = OTHER; note = guanosine-3'-phosphate
  modified_base 16: mod_base = OTHER; note = cytidine-3'-phosphate
  modified_base 17: mod_base = OTHER; note = cytidine-3'-phosphate
  modified_base 18: mod_base = OTHER; note = guanosine-3'-phosphate
  modified_base 19: mod_base = OTHER; note = cytidine-3'-phosphate
  misc_feature 1..19: note = RNA
  misc_feature 20..21: note = DNA
ggcgggtgggtacagccgctt

SEQ ID NO: 490 - DNA, 21 bp, synthetic construct
  source 1..21: mol_type = other DNA
  modified_base 1: mod_base = OTHER; note = guanosine-3'-phosphate
  modified_base 2: mod_base = OTHER; note = cytidine-3'-phosphate
  modified_base 3: mod_base = OTHER; note = guanosine-3'-phosphate
  modified_base 4: mod_base = OTHER; note = guanosine-3'-phosphate
  modified_base 5: mod_base = OTHER; note = cytidine-3'-phosphate
  modified_base 6: mod_base = OTHER; note = uridine-3'-phosphate
  modified_base 7: mod_base = OTHER; note = guanosine-3'-phosphate
  modified_base 8: mod_base = OTHER; note = uridine-3'-phosphate
  modified_base 9: mod_base = OTHER; note = adenosine-3'-phosphate
  modified_base 10: mod_base = OTHER; note = cytidine-3'-phosphate
  modified_base 11: mod_base = OTHER; note = cytidine-3'-phosphate
  modified_base 12: mod_base = OTHER; note = cytidine-3'-phosphate
  modified_base 13: mod_base = OTHER; note = adenosine-3'-phosphate
  modified_base 14: mod_base = OTHER; note = cytidine-3'-phosphate
  modified_base 15: mod_base = OTHER; note = cytidine-3'-phosphate
  modified_base 16: mod_base = OTHER; note = cytidine-3'-phosphate
  modified_base 17: mod_base = OTHER; note = guanosine-3'-phosphate
  modified_base 18: mod_base = OTHER; note = cytidine-3'-phosphate
  modified_base 19: mod_base = OTHER; note = cytidine-3'-phosphate
  misc_feature 1..19: note = RNA
  misc_feature 20..21: note = DNA
gcggctgtacccacccgcctt

SEQ ID NO: 491 - DNA, 21 bp, synthetic construct
  source 1..21: mol_type = other DNA
  modified_base 1: mod_base = OTHER; note = guanosine-3'-phosphate
  modified_base 2: mod_base = OTHER; note = guanosine-3'-phosphate
  modified_base 3: mod_base = OTHER; note = uridine-3'-phosphate
  modified_base 4: mod_base = OTHER; note = guanosine-3'-phosphate
  modified_base 5: mod_base = OTHER; note = guanosine-3'-phosphate
  modified_base 6: mod_base = OTHER; note = guanosine-3'-phosphate
  modified_base 7: mod_base = OTHER; note = uridine-3'-phosphate
  modified_base 8: mod_base = OTHER; note = adenosine-3'-phosphate
  modified_base 9: mod_base = OTHER; note = cytidine-3'-phosphate
  modified_base 10: mod_base = OTHER; note = adenosine-3'-phosphate
  modified_base 11: mod_base = OTHER; note = guanosine-3'-phosphate
  modified_base 12: mod_base = OTHER; note = cytidine-3'-phosphate
  modified_base 13: mod_base = OTHER; note = cytidine-3'-phosphate
  modified_base 14: mod_base = OTHER; note = guanosine-3'-phosphate
  modified_base 15: mod_base = OTHER; note = cytidine-3'-phosphate
  modified_base 16: mod_base = OTHER; note = guanosine-3'-phosphate
  modified_base 17: mod_base = OTHER; note = uridine-3'-phosphate
  modified_base 18: mod_base = OTHER; note = cytidine-3'-phosphate
  modified_base 19: mod_base = OTHER; note = cytidine-3'-phosphate
  misc_feature 1..19: note = RNA
  misc_feature 20..21: note = DNA
ggtgggtacagccgcgtcctt

SEQ ID NO: 492 - DNA, 21 bp, synthetic construct
  source 1..21: mol_type = other DNA
  modified_base 1: mod_base = OTHER; note = guanosine-3'-phosphate
  modified_base 2: mod_base = OTHER; note = guanosine-3'-phosphate
  modified_base 3: mod_base = OTHER; note = adenosine-3'-phosphate
  modified_base 4: mod_base = OTHER; note = cytidine-3'-phosphate
  modified_base 5: mod_base = OTHER; note = guanosine-3'-phosphate
  modified_base 6: mod_base = OTHER; note = cytidine-3'-phosphate
  modified_base 7: mod_base = OTHER; note = guanosine-3'-phosphate
  modified_base 8: mod_base = OTHER; note = guanosine-3'-phosphate
  modified_base 9: mod_base = OTHER; note = cytidine-3'-phosphate
  modified_base 10: mod_base = OTHER; note = uridine-3'-phosphate
  modified_base 11: mod_base = OTHER; note = guanosine-3'-phosphate
  modified_base 12: mod_base = OTHER; note = uridine-3'-phosphate
  modified_base 13: mod_base = OTHER; note = adenosine-3'-phosphate
  modified_base 14: mod_base = OTHER; note = cytidine-3'-phosphate
  modified_base 15: mod_base = OTHER; note = cytidine-3'-phosphate
  modified_base 16: mod_base = OTHER; note = cytidine-3'-phosphate
  modified_base 17: mod_base = OTHER; note = adenosine-3'-phosphate
  modified_base 18: mod_base = OTHER; note = cytidine-3'-phosphate
  modified_base 19: mod_base = OTHER; note = cytidine-3'-phosphate
  misc_feature 1..19: note = RNA
  misc_feature 20..21: note = DNA
ggacgcggctgtacccacctt

SEQ ID NO: 493 - DNA, 21 bp, synthetic construct
  source 1..21: mol_type = other DNA
  modified_base 1: mod_base = OTHER; note = uridine-3'-phosphate
  modified_base 2: mod_base = OTHER; note = guanosine-3'-phosphate
  modified_base 3: mod_base = OTHER; note = guanosine-3'-phosphate
  modified_base 4: mod_base = OTHER; note = guanosine-3'-phosphate
  modified_base 5: mod_base = OTHER; note = uridine-3'-phosphate
  modified_base 6: mod_base = OTHER; note = adenosine-3'-phosphate
  modified_base 7: mod_base = OTHER; note = cytidine-3'-phosphate
  modified_base 8: mod_base = OTHER; note = adenosine-3'-phosphate
  modified_base 9: mod_base = OTHER; note = guanosine-3'-phosphate
  modified_base 10: mod_base = OTHER; note = cytidine-3'-phosphate
  modified_base 11: mod_base = OTHER; note = cytidine-3'-phosphate
  modified_base 12: mod_base = OTHER; note = guanosine-3'-phosphate
  modified_base 13: mod_base = OTHER; note = cytidine-3'-phosphate
  modified_base 14: mod_base = OTHER; note = guanosine-3'-phosphate
  modified_base 15: mod_base = OTHER; note = uridine-3'-phosphate
  modified_base 16: mod_base = OTHER; note = cytidine-3'-phosphate
  modified_base 17: mod_base = OTHER; note = cytidine-3'-phosphate
  modified_base 18: mod_base = OTHER; note = uridine-3'-phosphate
  modified_base 19: mod_base = OTHER; note = cytidine-3'-phosphate
  misc_feature 1..19: note = RNA
  misc_feature 20..21: note = DNA
tgggtacagccgcgtcctctt

SEQ ID NO: 494 - DNA, 21 bp, synthetic construct
  source 1..21: mol_type = other DNA
  modified_base 1: mod_base = OTHER; note = guanosine-3'-phosphate
  modified_base 2: mod_base = OTHER; note = adenosine-3'-phosphate
  modified_base 3: mod_base = OTHER; note = guanosine-3'-phosphate
  modified_base 4: mod_base = OTHER; note = guanosine-3'-phosphate
  modified_base 5: mod_base = OTHER; note = adenosine-3'-phosphate
  modified_base 6: mod_base = OTHER; note = cytidine-3'-phosphate
  modified_base 7: mod_base = OTHER; note = guanosine-3'-phosphate
  modified_base 8: mod_base = OTHER; note = cytidine-3'-phosphate
  modified_base 9: mod_base = OTHER; note = guanosine-3'-phosphate
  modified_base 10: mod_base = OTHER; note = guanosine-3'-phosphate
  modified_base 11: mod_base = OTHER; note = cytidine-3'-phosphate
  modified_base 12: mod_base = OTHER; note = uridine-3'-phosphate
  modified_base 13: mod_base = OTHER; note = guanosine-3'-phosphate
  modified_base 14: mod_base = OTHER; note = uridine-3'-phosphate
  modified_base 15: mod_base = OTHER; note = adenosine-3'-phosphate
  modified_base 16: mod_base = OTHER; note = cytidine-3'-phosphate
  modified_base 17: mod_base = OTHER; note = cytidine-3'-phosphate
  modified_base 18: mod_base = OTHER; note = cytidine-3'-phosphate
  modified_base 19: mod_base = OTHER; note = adenosine-3'-phosphate
  misc_feature 1..19: note = RNA
  misc_feature 20..21: note = DNA
gaggacgcggctgtacccatt

SEQ ID NO: 495 - DNA, 21 bp, synthetic construct
  source 1..21: mol_type = other DNA
  modified_base 1: mod_base = OTHER; note = guanosine-3'-phosphate
  modified_base 2: mod_base = OTHER; note = cytidine-3'-phosphate
  modified_base 3: mod_base = OTHER; note = cytidine-3'-phosphate
  modified_base 4: mod_base = OTHER; note = guanosine-3'-phosphate
  modified_base 5: mod_base = OTHER; note = cytidine-3'-phosphate
  modified_base 6: mod_base = OTHER; note = guanosine-3'-phosphate
  modified_base 7: mod_base = OTHER; note = uridine-3'-phosphate
  modified_base 8: mod_base = OTHER; note = cytidine-3'-phosphate
  modified_base 9: mod_base = OTHER; note = cytidine-3'-phosphate
  modified_base 10: mod_base = OTHER; note = uridine-3'-phosphate
  modified_base 11: mod_base = OTHER; note = cytidine-3'-phosphate
  modified_base 12: mod_base = OTHER; note = adenosine-3'-phosphate
  modified_base 13: mod_base = OTHER; note = adenosine-3'-phosphate
  modified_base 14: mod_base = OTHER; note = cytidine-3'-phosphate
  modified_base 15: mod_base = OTHER; note = guanosine-3'-phosphate
  modified_base 16: mod_base = OTHER; note = cytidine-3'-phosphate
  modified_base 17: mod_base = OTHER; note = cytidine-3'-phosphate
  modified_base 18: mod_base = OTHER; note = guanosine-3'-phosphate
  modified_base 19: mod_base = OTHER; note = cytidine-3'-phosphate
  misc_feature 1..19: note = RNA
  misc_feature 20..21: note = DNA
gccgcgtcctcaacgccgctt

SEQ ID NO: 496 - DNA, 21 bp, synthetic construct
  source 1..21: mol_type = other DNA
  modified_base 1: mod_base = OTHER; note = guanosine-3'-phosphate
  modified_base 2: mod_base = OTHER; note = cytidine-3'-phosphate
  modified_base 3: mod_base = OTHER; note = guanosine-3'-phosphate
  modified_base 4: mod_base = OTHER; note = guanosine-3'-phosphate
  modified_base 5: mod_base = OTHER; note = cytidine-3'-phosphate
  modified_base 6: mod_base = OTHER; note = guanosine-3'-phosphate
  modified_base 7: mod_base = OTHER; note = uridine-3'-phosphate
  modified_base 8: mod_base = OTHER; note = uridine-3'-phosphate
  modified_base 9: mod_base = OTHER; note = guanosine-3'-phosphate
  modified_base 10: mod_base = OTHER; note = adenosine-3'-phosphate
  modified_base 11: mod_base = OTHER; note = guanosine-3'-phosphate
  modified_base 12: mod_base = OTHER; note = guanosine-3'-phosphate
  modified_base 13: mod_base = OTHER; note = adenosine-3'-phosphate
  modified_base 14: mod_base = OTHER; note = cytidine-3'-phosphate
  modified_base 15: mod_base = OTHER; note = guanosine-3'-phosphate
  modified_base 16: mod_base = OTHER; note = cytidine-3'-phosphate
  modified_base 17: mod_base = OTHER; note = guanosine-3'-phosphate
  modified_base 18: mod_base = OTHER; note = guanosine-3'-phosphate
  modified_base 19: mod_base = OTHER; note = cytidine-3'-phosphate
  misc_feature 1..19: note = RNA
  misc_feature 20..21: note = DNA
gcggcgttgaggacgcggctt

SEQ ID NO: 497 - DNA, 21 bp, synthetic construct
  source 1..21: mol_type = other DNA
  modified_base 1: mod_base = OTHER; note = cytidine-3'-phosphate
  modified_base 2: mod_base = OTHER; note = cytidine-3'-phosphate
  modified_base 3: mod_base = OTHER; note = guanosine-3'-phosphate
  modified_base 4: mod_base = OTHER; note = cytidine-3'-phosphate
  modified_base 5: mod_base = OTHER; note = guanosine-3'-phosphate
  modified_base 6: mod_base = OTHER; note = uridine-3'-phosphate
  modified_base 7: mod_base = OTHER; note = cytidine-3'-phosphate
  modified_base 8: mod_base = OTHER; note = cytidine-3'-phosphate
  modified_base 9: mod_base = OTHER; note = uridine-3'-phosphate
  modified_base 10: mod_base = OTHER; note = cytidine-3'-phosphate
  modified_base 11: mod_base = OTHER; note = adenosine-3'-phosphate
  modified_base 12: mod_base = OTHER; note = adenosine-3'-phosphate
  modified_base 13: mod_base = OTHER; note = cytidine-3'-phosphate
  modified_base 14: mod_base = OTHER; note = guanosine-3'-phosphate
  modified_base 15: mod_base = OTHER; note = cytidine-3'-phosphate
  modified_base 16: mod_base = OTHER; note = cytidine-3'-phosphate
  modified_base 17: mod_base = OTHER; note = guanosine-3'-phosphate
  modified_base 18: mod_base = OTHER; note = cytidine-3'-phosphate
  modified_base 19: mod_base = OTHER; note = cytidine-3'-phosphate
  misc_feature 1..19: note = RNA
  misc_feature 20..21: note = DNA
ccgcgtcctcaacgccgcctt

SEQ ID NO: 498 - DNA, 21 bp, synthetic construct
  source 1..21: mol_type = other DNA
  modified_base 1: mod_base = OTHER; note = guanosine-3'-phosphate
  modified_base 2: mod_base = OTHER; note = guanosine-3'-phosphate
  modified_base 3: mod_base = OTHER; note = cytidine-3'-phosphate
  modified_base 4: mod_base = OTHER; note = guanosine-3'-phosphate
  modified_base 5: mod_base = OTHER; note = guanosine-3'-phosphate
  modified_base 6: mod_base = OTHER; note = cytidine-3'-phosphate
  modified_base 7: mod_base = OTHER; note = guanosine-3'-phosphate
  modified_base 8: mod_base = OTHER; note = uridine-3'-phosphate
  modified_base 9: mod_base = OTHER; note = uridine-3'-phosphate
  modified_base 10: mod_base = OTHER; note = guanosine-3'-phosphate
  modified_base 11: mod_base = OTHER; note = adenosine-3'-phosphate
  modified_base 12: mod_base = OTHER; note = guanosine-3'-phosphate
  modified_base 13: mod_base = OTHER; note = guanosine-3'-phosphate
  modified_base 14: mod_base = OTHER; note = adenosine-3'-phosphate
  modified_base 15: mod_base = OTHER; note = cytidine-3'-phosphate
  modified_base 16: mod_base = OTHER; note = guanosine-3'-phosphate
  modified_base 17: mod_base = OTHER; note = cytidine-3'-phosphate
  modified_base 18: mod_base = OTHER; note = guanosine-3'-phosphate
  modified_base 19: mod_base = OTHER; note = guanosine-3'-phosphate
  misc_feature 1..19: note = RNA
  misc_feature 20..21: note = DNA
ggcggcgttgaggacgcggtt

SEQ ID NO: 499 - DNA, 21 bp, synthetic construct
  source 1..21: mol_type = other DNA
  modified_base 1: mod_base = OTHER; note = guanosine-3'-phosphate
  modified_base 2: mod_base = OTHER; note = uridine-3'-phosphate
  modified_base 3: mod_base = OTHER; note = cytidine-3'-phosphate
  modified_base 4: mod_base = OTHER; note = guanosine-3'-phosphate
  modified_base 5: mod_base = OTHER; note = uridine-3'-phosphate
  modified_base 6: mod_base = OTHER; note = guanosine-3'-phosphate
  modified_base 7: mod_base = OTHER; note = cytidine-3'-phosphate
  modified_base 8: mod_base = OTHER; note = uridine-3'-phosphate
  modified_base 9: mod_base = OTHER; note = guanosine-3'-phosphate
  modified_base 10: mod_base = OTHER; note = guanosine-3'-phosphate
  modified_base 11: mod_base = OTHER; note = uridine-3'-phosphate
  modified_base 12: mod_base = OTHER; note = cytidine-3'-phosphate
  modified_base 13: mod_base = OTHER; note = adenosine-3'-phosphate
  modified_base 14: mod_base = OTHER; note = cytidine-3'-phosphate
  modified_base 15: mod_base = OTHER; note = cytidine-3'-phosphate
  modified_base 16: mod_base = OTHER; note = guanosine-3'-phosphate
  modified_base 17: mod_base = OTHER; note = cytidine-3'-phosphate
  modified_base 18: mod_base = OTHER; note = uridine-3'-phosphate
  modified_base 19: mod_base = OTHER; note = guanosine-3'-phosphate
  modified_base 20: mod_base = OTHER; note = 2'-deoxythymidine-3'-phosphorothioate
  misc_feature 1..19: note = RNA
  misc_feature 20..21: note = DNA
gtcgtgctggtcaccgctgtt

SEQ ID NO: 500 - DNA, 21 bp, synthetic construct
  source 1..21: mol_type = other DNA
  modified_base 1: mod_base = OTHER; note = cytidine-3'-phosphate
  modified_base 2: mod_base = OTHER; note = adenosine-3'-phosphate
  modified_base 3: mod_base = OTHER; note = guanosine-3'-phosphate
  modified_base 4: mod_base = OTHER; note = cytidine-3'-phosphate
  modified_base 5: mod_base = OTHER; note = guanosine-3'-phosphate
  modified_base 6: mod_base = OTHER; note = guanosine-3'-phosphate
  modified_base 7: mod_base = OTHER; note = uridine-3'-phosphate
  modified_base 8: mod_base = OTHER; note = guanosine-3'-phosphate
  modified_base 9: mod_base = OTHER; note = adenosine-3'-phosphate
  modified_base 10: mod_base = OTHER; note = cytidine-3'-phosphate
  modified_base 11: mod_base = OTHER; note = cytidine-3'-phosphate
  modified_base 12: mod_base = OTHER; note = adenosine-3'-phosphate
  modified_base 13: mod_base = OTHER; note = guanosine-3'-phosphate
  modified_base 14: mod_base = OTHER; note = cytidine-3'-phosphate
  modified_base 15: mod_base = OTHER; note = adenosine-3'-phosphate
  modified_base 16: mod_base = OTHER; note = cytidine-3'-phosphate
  modified_base 17: mod_base = OTHER; note = guanosine-3'-phosphate
  modified_base 18: mod_base = OTHER; note = adenosine-3'-phosphate
  modified_base 19: mod_base = OTHER; note = cytidine-3'-phosphate
  modified_base 20: mod_base = OTHER; note = 2'-deoxythymidine-3'-phosphorothioate
  misc_feature 1..19: note = RNA
  misc_feature 20..21: note = DNA
cagcggtgaccagcacgactt

SEQ ID NO: 501 - DNA, 21 bp, synthetic construct
  source 1..21: mol_type = other DNA
  modified_base 1: mod_base = OTHER; note = guanosine-3'-phosphate
  modified_base 2: mod_base = OTHER; note = 2'-O-methyluridine-3'-phosphate
  modified_base 3: mod_base = OTHER; note = 2'-O-methylcytidine-3'-phosphate
  modified_base 4: mod_base = OTHER; note = guanosine-3'-phosphate
  modified_base 5: mod_base = OTHER; note = 2'-O-methyluridine-3'-phosphate
  modified_base 6: mod_base = OTHER; note = guanosine-3'-phosphate
  modified_base 7: mod_base = OTHER; note = 2'-O-methylcytidine-3'-phosphate
  modified_base 8: mod_base = OTHER; note = 2'-O-methyluridine-3'-phosphate
  modified_base 9: mod_base = OTHER; note = guanosine-3'-phosphate
  modified_base 10: mod_base = OTHER; note = guanosine-3'-phosphate
  modified_base 11: mod_base = OTHER; note = 2'-O-methyluridine-3'-phosphate
  modified_base 12: mod_base = OTHER; note = 2'-O-methylcytidine-3'-phosphate
  modified_base 13: mod_base = OTHER; note = adenosine-3'-phosphate
  modified_base 14: mod_base = OTHER; note = 2'-O-methylcytidine-3'-phosphate
  modified_base 15: mod_base = OTHER; note = 2'-O-methylcytidine-3'-phosphate
  modified_base 16: mod_base = OTHER; note = guanosine-3'-phosphate
  modified_base 17: mod_base = OTHER; note = 2'-O-methylcytidine-3'-phosphate
  modified_base 18: mod_base = OTHER; note = 2'-O-methyluridine-3'-phosphate
  modified_base 19: mod_base = OTHER; note = guanosine-3'-phosphate
  modified_base 20: mod_base = OTHER; note = 2'-deoxythymidine-3'-phosphorothioate
  misc_feature 1..19: note = RNA
  misc_feature 20..21: note = DNA
gtcgtgctggtcaccgctgtt

SEQ ID NO: 502 - DNA, 21 bp, synthetic construct
  source 1..21: mol_type = other DNA
  modified_base 1: mod_base = OTHER; note = 2'-O-methylcytidine-3'-phosphate
  modified_base 2: mod_base = OTHER; note = adenosine-3'-phosphate
  modified_base 3: mod_base = OTHER; note = guanosine-3'-phosphate
  modified_base 4: mod_base = OTHER; note = cytidine-3'-phosphate
  modified_base 5: mod_base = OTHER; note = guanosine-3'-phosphate
  modified_base 6: mod_base = OTHER; note = guanosine-3'-phosphate
  modified_base 7: mod_base = OTHER; note = uridine-3'-phosphate
  modified_base 8: mod_base = OTHER; note = guanosine-3'-phosphate
  modified_base 9: mod_base = OTHER; note = adenosine-3'-phosphate
  modified_base 10: mod_base = OTHER; note = cytidine-3'-phosphate
  modified_base 11: mod_base = OTHER; note = 2'-O-methylcytidine-3'-phosphate
  modified_base 12: mod_base = OTHER; note = adenosine-3'-phosphate
  modified_base 13: mod_base = OTHER; note = guanosine-3'-phosphate
  modified_base 14: mod_base = OTHER; note = 2'-O-methylcytidine-3'-phosphate
  modified_base 15: mod_base = OTHER; note = adenosine-3'-phosphate
  modified_base 16: mod_base = OTHER; note = cytidine-3'-phosphate
  modified_base 17: mod_base = OTHER; note = guanosine-3'-phosphate
  modified_base 18: mod_base = OTHER; note = adenosine-3'-phosphate
  modified_base 19: mod_base = OTHER; note = cytidine-3'-phosphate
  modified_base 20: mod_base = OTHER; note = 2'-deoxythymidine-3'-phosphorothioate
  misc_feature 1..19: note = RNA
  misc_feature 20..21: note = DNA
cagcggtgaccagcacgactt

SEQ ID NO: 503 - DNA, 21 bp, synthetic construct
  source 1..21: mol_type = other DNA
  modified_base 1: mod_base = OTHER; note = uridine-3'-phosphate
  modified_base 2: mod_base = OTHER; note = cytidine-3'-phosphate
  modified_base 3: mod_base = OTHER; note = guanosine-3'-phosphate
  modified_base 4: mod_base = OTHER; note = uridine-3'-phosphate
  modified_base 5: mod_base = OTHER; note = guanosine-3'-phosphate
  modified_base 6: mod_base = OTHER; note = cytidine-3'-phosphate
  modified_base 7: mod_base = OTHER; note = uridine-3'-phosphate
  modified_base 8: mod_base = OTHER; note = guanosine-3'-phosphate
  modified_base 9: mod_base = OTHER; note = guanosine-3'-phosphate
  modified_base 10: mod_base = OTHER; note = uridine-3'-phosphate
  modified_base 11: mod_base = OTHER; note = cytidine-3'-phosphate
  modified_base 12: mod_base = OTHER; note = adenosine-3'-phosphate
  modified_base 13: mod_base = OTHER; note = cytidine-3'-phosphate
  modified_base 14: mod_base = OTHER; note = cytidine-3'-phosphate
  modified_base 15: mod_base = OTHER; note = guanosine-3'-phosphate
  modified_base 16: mod_base = OTHER; note = cytidine-3'-phosphate
  modified_base 17: mod_base = OTHER; note = uridine-3'-phosphate
  modified_base 18: mod_base = OTHER; note = guanosine-3'-phosphate
  modified_base 19: mod_base = OTHER; note = cytidine-3'-phosphate
  modified_base 20: mod_base = OTHER; note = 2'-deoxythymidine-3'-phosphorothioate
  misc_feature 1..19: note = RNA
  misc_feature 20..21: note = DNA
tcgtgctggtcaccgctgctt

SEQ ID NO: 504 - DNA, 21 bp, synthetic construct
  source 1..21: mol_type = other DNA
  modified_base 1: mod_base = OTHER; note = guanosine-3'-phosphate
  modified_base 2: mod_base = OTHER; note = cytidine-3'-phosphate
  modified_base 3: mod_base = OTHER; note = adenosine-3'-phosphate
  modified_base 4: mod_base = OTHER; note = guanosine-3'-phosphate
  modified_base 5: mod_base = OTHER; note = cytidine-3'-phosphate
  modified_base 6: mod_base = OTHER; note = guanosine-3'-phosphate
  modified_base 7: mod_base = OTHER; note = guanosine-3'-phosphate
  modified_base 8: mod_base = OTHER; note = uridine-3'-phosphate
  modified_base 9: mod_base = OTHER; note = guanosine-3'-phosphate
  modified_base 10: mod_base = OTHER; note = adenosine-3'-phosphate
  modified_base 11: mod_base = OTHER; note = cytidine-3'-phosphate
  modified_base 12: mod_base = OTHER; note = cytidine-3'-phosphate
  modified_base 13: mod_base = OTHER; note = adenosine-3'-phosphate
  modified_base 14: mod_base = OTHER; note = guanosine-3'-phosphate
  modified_base 15: mod_base = OTHER; note = cytidine-3'-phosphate
  modified_base 16: mod_base = OTHER; note = adenosine-3'-phosphate
  modified_base 17: mod_base = OTHER; note = cytidine-3'-phosphate
  modified_base 18: mod_base = OTHER; note = guanosine-3'-phosphate
  modified_base 19: mod_base = OTHER; note = adenosine-3'-phosphate
  modified_base 20: mod_base = OTHER; note = 2'-deoxythymidine-3'-phosphorothioate
  misc_feature 1..19: note = RNA
  misc_feature 20..21: note = DNA
gcagcggtgaccagcacgatt

SEQ ID NO: 505 - DNA, 21 bp, synthetic construct
  source 1..21: mol_type = other DNA
  modified_base 1: mod_base = OTHER; note = 2'-O-methyluridine-3'-phosphate
  modified_base 2: mod_base = OTHER; note = 2'-O-methylcytidine-3'-phosphate
  modified_base 3: mod_base = OTHER; note = guanosine-3'-phosphate
  modified_base 4: mod_base = OTHER; note = 2'-O-methyluridine-3'-phosphate
  modified_base 5: mod_base = OTHER; note = guanosine-3'-phosphate
  modified_base 6: mod_base = OTHER; note = 2'-O-methylcytidine-3'-phosphate
  modified_base 7: mod_base = OTHER; note = 2'-O-methyluridine-3'-phosphate
  modified_base 8: mod_base = OTHER; note = guanosine-3'-phosphate
  modified_base 9: mod_base = OTHER; note = guanosine-3'-phosphate
  modified_base 10: mod_base = OTHER; note = 2'-O-methyluridine-3'-phosphate
  modified_base 11: mod_base = OTHER; note = 2'-O-methylcytidine-3'-phosphate
  modified_base 12: mod_base = OTHER; note = adenosine-3'-phosphate
  modified_base 13: mod_base = OTHER; note = 2'-O-methylcytidine-3'-phosphate
  modified_base 14: mod_base = OTHER; note = 2'-O-methylcytidine-3'-phosphate
  modified_base 15: mod_base = OTHER; note = guanosine-3'-phosphate
  modified_base 16: mod_base = OTHER; note = 2'-O-methylcytidine-3'-phosphate
  modified_base 17: mod_base = OTHER; note = 2'-O-methyluridine-3'-phosphate
  modified_base 18: mod_base = OTHER; note = guanosine-3'-phosphate
  modified_base 19: mod_base = OTHER; note = 2'-O-methylcytidine-3'-phosphate
  modified_base 20: mod_base = OTHER; note = 2'-deoxythymidine-3'-phosphorothioate
  misc_feature 1..19: note = RNA
  misc_feature 20..21: note = DNA
tcgtgctggtcaccgctgctt

SEQ ID NO: 506 - DNA, 21 bp, synthetic construct
  source 1..21: mol_type = other DNA
  modified_base 1: mod_base = OTHER; note = guanosine-3'-phosphate
  modified_base 2: mod_base = OTHER; note = 2'-O-methylcytidine-3'-phosphate
  modified_base 3: mod_base = OTHER; note = adenosine-3'-phosphate
  modified_base 4: mod_base = OTHER; note = guanosine-3'-phosphate
  modified_base 5: mod_base = OTHER; note = cytidine-3'-phosphate
  modified_base 6: mod_base = OTHER; note = guanosine-3'-phosphate
  modified_base 7: mod_base = OTHER; note = guanosine-3'-phosphate
  modified_base 8: mod_base = OTHER; note = uridine-3'-phosphate
  modified_base 9: mod_base = OTHER; note = guanosine-3'-phosphate
  modified_base 10: mod_base = OTHER; note = adenosine-3'-phosphate
  modified_base 11: mod_base = OTHER; note = cytidine-3'-phosphate
  modified_base 12: mod_base = OTHER; note = 2'-O-methylcytidine-3'-phosphate
  modified_base 13: mod_base = OTHER; note = adenosine-3'-phosphate
  modified_base 14: mod_base = OTHER; note = guanosine-3'-phosphate
  modified_base 15: mod_base = OTHER; note = 2'-O-methylcytidine-3'-phosphate
  modified_base 16: mod_base = OTHER; note = adenosine-3'-phosphate
  modified_base 17: mod_base = OTHER; note = cytidine-3'-phosphate
  modified_base 18: mod_base = OTHER; note = guanosine-3'-phosphate
  modified_base 19: mod_base = OTHER; note = adenosine-3'-phosphate
  modified_base 20: mod_base = OTHER; note = 2'-deoxythymidine-3'-phosphorothioate
  misc_feature 1..19: note = RNA
  misc_feature 20..21: note = DNA
gcagcggtgaccagcacgatt

SEQ ID NO: 507 - DNA, 21 bp, synthetic construct
  source 1..21: mol_type = other DNA
  modified_base 1: mod_base = OTHER; note = uridine-3'-phosphate
  modified_base 2: mod_base = OTHER; note = guanosine-3'-phosphate
  modified_base 3: mod_base = OTHER; note = guanosine-3'-phosphate
  modified_base 4: mod_base = OTHER; note = uridine-3'-phosphate
  modified_base 5: mod_base = OTHER; note = cytidine-3'-phosphate
  modified_base 6: mod_base = OTHER; note = adenosine-3'-phosphate
  modified_base 7: mod_base = OTHER; note = cytidine-3'-phosphate
  modified_base 8: mod_base = OTHER; note = cytidine-3'-phosphate
  modified_base 9: mod_base = OTHER; note = guanosine-3'-phosphate
  modified_base 10: mod_base = OTHER; note = cytidine-3'-phosphate
  modified_base 11: mod_base = OTHER; note = uridine-3'-phosphate
  modified_base 12: mod_base = OTHER; note = guanosine-3'-phosphate
  modified_base 13: mod_base = OTHER; note = cytidine-3'-phosphate
  modified_base 14: mod_base = OTHER; note = cytidine-3'-phosphate
  modified_base 15: mod_base = OTHER; note = guanosine-3'-phosphate
  modified_base 16: mod_base = OTHER; note = guanosine-3'-phosphate
  modified_base 17: mod_base = OTHER; note = cytidine-3'-phosphate
  modified_base 18: mod_base = OTHER; note = adenosine-3'-phosphate
  modified_base 19: mod_base = OTHER; note = adenosine-3'-phosphate
  modified_base 20: mod_base = OTHER; note = 2'-deoxythymidine-3'-phosphorothioate
  misc_feature 1..19: note = RNA
  misc_feature 20..21: note = DNA
tggtcaccgctgccggcaatt

SEQ ID NO: 508 - DNA, 21 bp, synthetic construct
  source 1..21: mol_type = other DNA
  modified_base 1: mod_base = OTHER; note = uridine-3'-phosphate
  modified_base 2: mod_base = OTHER; note = uridine-3'-phosphate
  modified_base 3: mod_base = OTHER; note = guanosine-3'-phosphate
  modified_base 4: mod_base = OTHER; note = cytidine-3'-phosphate
  modified_base 5: mod_base = OTHER; note = cytidine-3'-phosphate
  modified_base 6: mod_base = OTHER; note = guanosine-3'-phosphate
  modified_base 7: mod_base = OTHER; note = guanosine-3'-phosphate
  modified_base 8: mod_base = OTHER; note = cytidine-3'-phosphate
  modified_base 9: mod_base = OTHER; note = adenosine-3'-phosphate
  modified_base 10: mod_base = OTHER; note = guanosine-3'-phosphate
  modified_base 11: mod_base = OTHER; note = cytidine-3'-phosphate
  modified_base 12: mod_base = OTHER; note = guanosine-3'-phosphate
  modified_base 13: mod_base = OTHER; note = guanosine-3'-phosphate
  modified_base 14: mod_base = OTHER; note = uridine-3'-phosphate
  modified_base 15: mod_base = OTHER; note = guanosine-3'-phosphate
  modified_base 16: mod_base = OTHER; note = adenosine-3'-phosphate
  modified_base 17: mod_base = OTHER; note = cytidine-3'-phosphate
  modified_base 18: mod_base = OTHER; note = cytidine-3'-phosphate
  modified_base 19: mod_base = OTHER; note = adenosine-3'-phosphate
  modified_base 20: mod_base = OTHER; note = 2'-deoxythymidine-3'-phosphorothioate
  misc_feature 1..19: note = RNA
  misc_feature 20..21: note = DNA
ttgccggcagcggtgaccatt

SEQ ID NO: 509 - DNA, 21 bp, synthetic construct
  source 1..21: mol_type = other DNA
  modified_base 1: mod_base = OTHER; note = 2'-O-methyluridine-3'-phosphate
  modified_base 2: mod_base = OTHER; note = guanosine-3'-phosphate
  modified_base 3: mod_base = OTHER; note = guanosine-3'-phosphate
  modified_base 4: mod_base = OTHER; note = 2'-O-methyluridine-3'-phosphate
  modified_base 5: mod_base = OTHER; note = 2'-O-methylcytidine-3'-phosphate
  modified_base 6: mod_base = OTHER; note = adenosine-3'-phosphate
  modified_base 7: mod_base = OTHER; note = 2'-O-methylcytidine-3'-phosphate
  modified_base 8: mod_base = OTHER; note = 2'-O-methylcytidine-3'-phosphate
  modified_base 9: mod_base = OTHER; note = guanosine-3'-phosphate
  modified_base 10: mod_base = OTHER; note = 2'-O-methylcytidine-3'-phosphate
  modified_base 11: mod_base = OTHER; note = 2'-O-methyluridine-3'-phosphate
  modified_base 12: mod_base = OTHER; note = guanosine-3'-phosphate
  modified_base 13: mod_base = OTHER; note = 2'-O-methylcytidine-3'-phosphate
  modified_base 14: mod_base = OTHER; note = 2'-O-methylcytidine-3'-phosphate
  modified_base 15: mod_base = OTHER; note = guanosine-3'-phosphate
  modified_base 16: mod_base = OTHER; note = guanosine-3'-phosphate
  modified_base 17: mod_base = OTHER; note = 2'-O-methylcytidine-3'-phosphate
  modified_base 18: mod_base = OTHER; note = adenosine-3'-phosphate
  modified_base 19: mod_base = OTHER; note = adenosine-3'-phosphate
  modified_base 20: mod_base = OTHER; note = 2'-deoxythymidine-3'-phosphorothioate
  misc_feature 1..19: note = RNA
  misc_feature 20..21: note = DNA
tggtcaccgctgccggcaatt

SEQ ID NO: 510 - DNA, 21 bp, synthetic construct
  source 1..21: mol_type = other DNA
  modified_base 1: mod_base = OTHER; note = uridine-3'-phosphate
  modified_base 2: mod_base = OTHER; note = uridine-3'-phosphate
  modified_base 3: mod_base = OTHER; note = guanosine-3'-phosphate
  modified_base 4: mod_base = OTHER; note = cytidine-3'-phosphate
  modified_base 5: mod_base = OTHER; note = cytidine-3'-phosphate
  modified_base 6: mod_base = OTHER; note = guanosine-3'-phosphate
  modified_base 7: mod_base = OTHER; note = guanosine-3'-phosphate
  modified_base 8: mod_base = OTHER; note = 2'-O-methylcytidine-3'-phosphate
  modified_base 9: mod_base = OTHER; note = adenosine-3'-phosphate
  modified_base 10: mod_base = OTHER; note = guanosine-3'-phosphate
  modified_base 11: mod_base = OTHER; note = cytidine-3'-phosphate
  modified_base 12: mod_base = OTHER; note = guanosine-3'-phosphate
  modified_base 13: mod_base = OTHER; note = guanosine-3'-phosphate
  modified_base 14: mod_base = OTHER; note = uridine-3'-phosphate
  modified_base 15: mod_base = OTHER; note = guanosine-3'-phosphate
  modified_base 16: mod_base = OTHER; note = adenosine-3'-phosphate
  modified_base 17: mod_base = OTHER; note = cytidine-3'-phosphate
  modified_base 18: mod_base = OTHER; note = 2'-O-methylcytidine-3'-phosphate
  modified_base 19: mod_base = OTHER; note = adenosine-3'-phosphate
  modified_base 20: mod_base = OTHER; note = 2'-deoxythymidine-3'-phosphorothioate
  misc_feature 1..19: note = RNA
  misc_feature 20..21: note = DNA
ttgccggcagcggtgaccatt

SEQ ID NO: 511 - DNA, 21 bp, synthetic construct
  source 1..21: mol_type = other DNA
  modified_base 1: mod_base = OTHER; note = guanosine-3'-phosphate
  modified_base 2: mod_base = OTHER; note = guanosine-3'-phosphate
  modified_base 3: mod_base = OTHER; note = uridine-3'-phosphate
  modified_base 4: mod_base = OTHER; note = cytidine-3'-phosphate
  modified_base 5: mod_base = OTHER; note = adenosine-3'-phosphate
  modified_base 6: mod_base = OTHER; note = cytidine-3'-phosphate
  modified_base 7: mod_base = OTHER; note = cytidine-3'-phosphate
  modified_base 8: mod_base = OTHER; note = guanosine-3'-phosphate
  modified_base 9: mod_base = OTHER; note = cytidine-3'-phosphate
  modified_base 10: mod_base = OTHER; note = uridine-3'-phosphate
  modified_base 11: mod_base = OTHER; note = guanosine-3'-phosphate
  modified_base 12: mod_base = OTHER; note = cytidine-3'-phosphate
  modified_base 13: mod_base = OTHER; note = cytidine-3'-phosphate
  modified_base 14: mod_base = OTHER; note = guanosine-3'-phosphate
  modified_base 15: mod_base = OTHER; note = guanosine-3'-phosphate
  modified_base 16: mod_base = OTHER; note = cytidine-3'-phosphate
  modified_base 17: mod_base = OTHER; note = adenosine-3'-phosphate
  modified_base 18: mod_base = OTHER; note = adenosine-3'-phosphate
  modified_base 19: mod_base = OTHER; note = cytidine-3'-phosphate
  modified_base 20: mod_base = OTHER; note = 2'-deoxythymidine-3'-phosphorothioate
  misc_feature 1..19: note = RNA
  misc_feature 20..21: note = DNA
ggtcaccgctgccggcaactt

SEQ ID NO: 512 - DNA, 21 bp, synthetic construct
  source 1..21: mol_type = other DNA
  modified_base 1: mod_base = OTHER; note = guanosine-3'-phosphate
  modified_base 2: mod_base = OTHER; note = uridine-3'-phosphate
  modified_base 3: mod_base = OTHER; note = uridine-3'-phosphate
  modified_base 4: mod_base = OTHER; note = guanosine-3'-phosphate
  modified_base 5: mod_base = OTHER; note = cytidine-3'-phosphate
  modified_base 6: mod_base = OTHER; note = cytidine-3'-phosphate
  modified_base 7: mod_base = OTHER; note = guanosine-3'-phosphate
  modified_base 8: mod_base = OTHER; note = guanosine-3'-phosphate
  modified_base 9: mod_base = OTHER; note = cytidine-3'-phosphate
  modified_base 10: mod_base = OTHER; note = adenosine-3'-phosphate
  modified_base 11: mod_base = OTHER; note = guanosine-3'-phosphate
  modified_base 12: mod_base = OTHER; note = cytidine-3'-phosphate
  modified_base 13: mod_base = OTHER; note = guanosine-3'-phosphate
  modified_base 14: mod_base = OTHER; note = guanosine-3'-phosphate
  modified_base 15: mod_base = OTHER; note = uridine-3'-phosphate
  modified_base 16: mod_base = OTHER; note = guanosine-3'-phosphate
  modified_base 17: mod_base = OTHER; note = adenosine-3'-phosphate
  modified_base 18: mod_base = OTHER; note = cytidine-3'-phosphate
  modified_base 19: mod_base = OTHER; note = cytidine-3'-phosphate
  modified_base 20: mod_base = OTHER; note = 2'-deoxythymidine-3'-phosphorothioate
  misc_feature 1..19: note = RNA
  misc_feature 20..21: note = DNA
gttgccggcagcggtgacctt

SEQ ID NO: 513 - DNA, 21 bp, synthetic construct
  source 1..21: mol_type = other DNA
  modified_base 1: mod_base = OTHER; note = guanosine-3'-phosphate
  modified_base 2: mod_base = OTHER; note = guanosine-3'-phosphate
  modified_base 3: mod_base = OTHER; note = 2'-O-methyluridine-3'-phosphate
  modified_base 4: mod_base = OTHER; note = 2'-O-methylcytidine-3'-phosphate
  modified_base 5: mod_base = OTHER; note = adenosine-3'-phosphate
  modified_base 6: mod_base = OTHER; note = 2'-O-methylcytidine-3'-phosphate
  modified_base 7: mod_base = OTHER; note = 2'-O-methylcytidine-3'-phosphate
  modified_base 8: mod_base = OTHER; note = guanosine-3'-phosphate
  modified_base 9: mod_base = OTHER; note = 2'-O-methylcytidine-3'-phosphate
  modified_base 10: mod_base = OTHER; note = 2'-O-methyluridine-3'-phosphate
  modified_base 11: mod_base = OTHER; note = guanosine-3'-phosphate
  modified_base 12: mod_base = OTHER; note = 2'-O-methylcytidine-3'-phosphate
  modified_base 13: mod_base = OTHER; note = 2'-O-methylcytidine-3'-phosphate
  modified_base 14: mod_base = OTHER; note = guanosine-3'-phosphate
  modified_base 15: mod_base = OTHER; note = guanosine-3'-phosphate
  modified_base 16: mod_base = OTHER; note = 2'-O-methylcytidine-3'-phosphate
  modified_base 17: mod_base = OTHER; note = adenosine-3'-phosphate
  modified_base 18: mod_base = OTHER; note = adenosine-3'-phosphate
  modified_base 19: mod_base = OTHER; note = 2'-O-methylcytidine-3'-phosphate
  modified_base 20: mod_base = OTHER; note = 2'-deoxythymidine-3'-phosphorothioate
  misc_feature 1..19: note = RNA
  misc_feature 20..21: note = DNA
ggtcaccgctgccggcaactt

SEQ ID NO: 514 - DNA, 21 bp, synthetic construct
  source 1..21: mol_type = other DNA
  modified_base 1: mod_base = OTHER; note = guanosine-3'-phosphate
  modified_base 2: mod_base = OTHER; note = uridine-3'-phosphate
  modified_base 3: mod_base = OTHER; note = uridine-3'-phosphate
  modified_base 4: mod_base = OTHER; note = guanosine-3'-phosphate
  modified_base 5: mod_base = OTHER; note = cytidine-3'-phosphate
  modified_base 6: mod_base = OTHER; note = cytidine-3'-phosphate
  modified_base 7: mod_base = OTHER; note = guanosine-3'-phosphate
  modified_base 8: mod_base = OTHER; note = guanosine-3'-phosphate
  modified_base 9: mod_base = OTHER; note = 2'-O-methylcytidine-3'-phosphate
  modified_base 10: mod_base = OTHER; note = adenosine-3'-phosphate
  modified_base 11: mod_base = OTHER; note = guanosine-3'-phosphate
  modified_base 12: mod_base = OTHER; note = cytidine-3'-phosphate
  modified_base 13: mod_base = OTHER; note = guanosine-3'-phosphate
  modified_base 14: mod_base = OTHER; note = guanosine-3'-phosphate
  modified_base 15: mod_base = OTHER; note = uridine-3'-phosphate
  modified_base 16: mod_base = OTHER; note = guanosine-3'-phosphate
  modified_base 17: mod_base = OTHER; note = adenosine-3'-phosphate
  modified_base 18: mod_base = OTHER; note = cytidine-3'-phosphate
  modified_base 19: mod_base = OTHER; note = cytidine-3'-phosphate
  modified_base 20: mod_base = OTHER; note = 2'-deoxythymidine-3'-phosphorothioate
  misc_feature 1..19: note = RNA
  misc_feature 20..21: note = DNA
gttgccggcagcggtgacctt

SEQ ID NO: 515 - DNA, 21 bp, synthetic construct
  source 1..21: mol_type = other DNA
  modified_base 1: mod_base = OTHER; note = cytidine-3'-phosphate
  modified_base 2: mod_base = OTHER; note = adenosine-3'-phosphate
  modified_base 3: mod_base = OTHER; note = cytidine-3'-phosphate
  modified_base 4: mod_base = OTHER; note = cytidine-3'-phosphate
  modified_base 5: mod_base = OTHER; note = guanosine-3'-phosphate
  modified_base 6: mod_base = OTHER; note = cytidine-3'-phosphate
  modified_base 7: mod_base = OTHER; note = uridine-3'-phosphate
  modified_base 8: mod_base = OTHER; note = guanosine-3'-phosphate
  modified_base 9: mod_base = OTHER; note = cytidine-3'-phosphate
  modified_base 10: mod_base = OTHER; note = cytidine-3'-phosphate
  modified_base 11: mod_base = OTHER; note = guanosine-3'-phosphate
  modified_base 12: mod_base = OTHER; note = guanosine-3'-phosphate
  modified_base 13: mod_base = OTHER; note = cytidine-3'-phosphate
  modified_base 14: mod_base = OTHER; note = adenosine-3'-phosphate
  modified_base 15: mod_base = OTHER; note = adenosine-3'-phosphate
  modified_base 16: mod_base = OTHER; note = cytidine-3'-phosphate
  modified_base 17: mod_base = OTHER; note = uridine-3'-phosphate
  modified_base 18: mod_base = OTHER; note = uridine-3'-phosphate
  modified_base 19: mod_base = OTHER; note = cytidine-3'-phosphate
  modified_base 20: mod_base = OTHER; note = 2'-deoxythymidine-3'-phosphorothioate
  misc_feature 1..19: note = RNA
  misc_feature 20..21: note = DNA
caccgctgccggcaacttctt

SEQ ID NO: 516 - DNA, 21 bp, synthetic construct
  source 1..21: mol_type = other DNA
  modified_base 1: mod_base = OTHER; note = guanosine-3'-phosphate
  modified_base 2: mod_base = OTHER; note = adenosine-3'-phosphate
  modified_base 3: mod_base = OTHER; note = adenosine-3'-phosphate
  modified_base 4: mod_base = OTHER; note = guanosine-3'-phosphate
  modified_base 5: mod_base = OTHER; note = uridine-3'-phosphate
  modified_base 6: mod_base = OTHER; note = uridine-3'-phosphate
  modified_base 7: mod_base = OTHER; note = guanosine-3'-phosphate
  modified_base 8: mod_base = OTHER; note = cytidine-3'-phosphate
  modified_base 9: mod_base = OTHER; note = cytidine-3'-phosphate
  modified_base 10: mod_base = OTHER; note = guanosine-3'-phosphate
  modified_base 11: mod_base = OTHER; note = guanosine-3'-phosphate
  modified_base 12: mod_base = OTHER; note = cytidine-3'-phosphate
  modified_base 13: mod_base = OTHER; note = adenosine-3'-phosphate
  modified_base 14: mod_base = OTHER; note = guanosine-3'-phosphate
  modified_base 15: mod_base = OTHER; note = cytidine-3'-phosphate
  modified_base 16: mod_base = OTHER; note = guanosine-3'-phosphate
  modified_base 17: mod_base = OTHER; note = guanosine-3'-phosphate
  modified_base 18: mod_base = OTHER; note = uridine-3'-phosphate
  modified_base 19: mod_base = OTHER; note = guanosine-3'-phosphate
  modified_base 20: mod_base = OTHER; note = 2'-deoxythymidine-3'-phosphorothioate
  misc_feature 1..19: note = RNA
  misc_feature 20..21: note = DNA
gaagttgccggcagcggtgtt

SEQ ID NO: 517 - DNA, 21 bp, synthetic construct
  source 1..21: mol_type = other DNA
  modified_base 1: mod_base = OTHER; note = 2'-O-methylcytidine-3'-phosphate
  modified_base 2: mod_base = OTHER; note = adenosine-3'-phosphate
  modified_base 3: mod_base = OTHER; note = 2'-O-methylcytidine-3'-phosphate
  modified_base 4: mod_base = OTHER; note = 2'-O-methylcytidine-3'-phosphate
  modified_base 5: mod_base = OTHER; note = guanosine-3'-phosphate
  modified_base 6: mod_base = OTHER; note = 2'-O-methylcytidine-3'-phosphate
  modified_base 7: mod_base = OTHER; note = 2'-O-methyluridine-3'-phosphate
  modified_base 8: mod_base = OTHER; note = guanosine-3'-phosphate
  modified_base 9: mod_base = OTHER; note = 2'-O-methylcytidine-3'-phosphate
  modified_base 10: mod_base = OTHER; note = 2'-O-methylcytidine-3'-phosphate
  modified_base 11: mod_base = OTHER; note = guanosine-3'-phosphate
  modified_base 12: mod_base = OTHER; note = guanosine-3'-phosphate
  modified_base 13: mod_base = OTHER; note = 2'-O-methylcytidine-3'-phosphate
  modified_base 14: mod_base = OTHER; note = adenosine-3'-phosphate
  modified_base 15: mod_base = OTHER; note = adenosine-3'-phosphate
  modified_base 16: mod_base = OTHER; note = 2'-O-methylcytidine-3'-phosphate
  modified_base 17: mod_base = OTHER; note = 2'-O-methyluridine-3'-phosphate
  modified_base 18: mod_base = OTHER; note = 2'-O-methyluridine-3'-phosphate
  modified_base 19: mod_base = OTHER; note = 2'-O-methylcytidine-3'-phosphate
  modified_base 20: mod_base = OTHER; note = 2'-deoxythymidine-3'-phosphorothioate
  misc_feature 1..19: note = RNA
  misc_feature 20..21: note = DNA
caccgctgccggcaacttctt

SEQ ID NO: 518 - DNA, 21 bp, synthetic construct
  source 1..21: mol_type = other DNA
  modified_base 1: mod_base = OTHER; note = guanosine-3'-phosphate
  modified_base 2: mod_base = OTHER; note = adenosine-3'-phosphate
  modified_base 3: mod_base = OTHER; note = adenosine-3'-phosphate
  modified_base 4: mod_base = OTHER; note = guanosine-3'-phosphate
  modified_base 5: mod_base = OTHER; note = uridine-3'-phosphate
  modified_base 6: mod_base = OTHER; note = uridine-3'-phosphate
  modified_base 7: mod_base = OTHER; note = guanosine-3'-phosphate
  modified_base 8: mod_base = OTHER; note = cytidine-3'-phosphate
  modified_base 9: mod_base = OTHER; note = cytidine-3'-phosphate
  modified_base 10: mod_base = OTHER; note = guanosine-3'-phosphate
  modified_base 11: mod_base = OTHER; note = guanosine-3'-phosphate
  modified_base 12: mod_base = OTHER; note = 2'-O-methylcytidine-3'-phosphate
  modified_base 13: mod_base = OTHER; note = adenosine-3'-phosphate
  modified_base 14: mod_base = OTHER; note = guanosine-3'-phosphate
  modified_base 15: mod_base = OTHER; note = cytidine-3'-phosphate
  modified_base 16: mod_base = OTHER; note = guanosine-3'-phosphate
  modified_base 17: mod_base = OTHER; note = guanosine-3'-phosphate
  modified_base 18: mod_base = OTHER; note = uridine-3'-phosphate
  modified_base 19: mod_base = OTHER; note = guanosine-3'-phosphate
  modified_base 20: mod_base = OTHER; note = 2'-deoxythymidine-3'-phosphorothioate
  misc_feature 1..19: note = RNA
  misc_feature 20..21: note = DNA
gaagttgccggcagcggtgtt

SEQ ID NO: 519 - DNA, 21 bp, synthetic construct
  source 1..21: mol_type = other DNA
  modified_base 1: mod_base = OTHER; note = cytidine-3'-phosphate
  modified_base 2: mod_base = OTHER; note = cytidine-3'-phosphate
  modified_base 3: mod_base = OTHER; note = guanosine-3'-phosphate
  modified_base 4: mod_base = OTHER; note = cytidine-3'-phosphate
  modified_base 5: mod_base = OTHER; note = uridine-3'-phosphate
  modified_base 6: mod_base = OTHER; note = guanosine-3'-phosphate
  modified_base 7: mod_base = OTHER; note = cytidine-3'-phosphate
  modified_base 8: mod_base = OTHER; note = cytidine-3'-phosphate
  modified_base 9: mod_base = OTHER; note = guanosine-3'-phosphate
  modified_base 10: mod_base = OTHER; note = guanosine-3'-phosphate
  modified_base 11: mod_base = OTHER; note = cytidine-3'-phosphate
  modified_base 12: mod_base = OTHER; note = adenosine-3'-phosphate
  modified_base 13: mod_base = OTHER; note = adenosine-3'-phosphate
  modified_base 14: mod_base = OTHER; note = cytidine-3'-phosphate
  modified_base 15: mod_base = OTHER; note = uridine-3'-phosphate
  modified_base 16: mod_base = OTHER; note = uridine-3'-phosphate
  modified_base 17: mod_base = OTHER; note = cytidine-3'-phosphate
  modified_base 18: mod_base = OTHER; note = cytidine-3'-phosphate
  modified_base 19: mod_base = OTHER; note = guanosine-3'-phosphate
  modified_base 20: mod_base = OTHER; note = 2'-deoxythymidine-3'-phosphorothioate
  misc_feature 1..19: note = RNA
  misc_feature 20..21: note = DNA
ccgctgccggcaacttccgtt

SEQ ID NO: 520 - DNA, 21 bp, synthetic construct
  source 1..21: mol_type = other DNA
  modified_base 1: mod_base = OTHER; note = cytidine-3'-phosphate
  modified_base 2: mod_base = OTHER; note = guanosine-3'-phosphate
  modified_base 3: mod_base = OTHER; note = guanosine-3'-phosphate
  modified_base 4: mod_base = OTHER; note = adenosine-3'-phosphate
  modified_base 5: mod_base = OTHER; note = adenosine-3'-phosphate
  modified_base 6: mod_base = OTHER; note = guanosine-3'-phosphate
  modified_base 7: mod_base = OTHER; note = uridine-3'-phosphate
  modified_base 8: mod_base = OTHER; note = uridine-3'-phosphate
  modified_base 9: mod_base = OTHER; note = guanosine-3'-phosphate
  modified_base 10: mod_base = OTHER; note = cytidine-3'-phosphate
  modified_base 11: mod_base = OTHER; note = cytidine-3'-phosphate
  modified_base 12: mod_base = OTHER; note = guanosine-3'-phosphate
  modified_base 13: mod_base = OTHER; note = guanosine-3'-phosphate
  modified_base 14: mod_base = OTHER; note = cytidine-3'-phosphate
  modified_base 15: mod_base = OTHER; note = adenosine-3'-phosphate
  modified_base 16: mod_base = OTHER; note = guanosine-3'-phosphate
  modified_base 17: mod_base = OTHER; note = cytidine-3'-phosphate
  modified_base 18: mod_base = OTHER; note = guanosine-3'-phosphate
  modified_base 19: mod_base = OTHER; note = guanosine-3'-phosphate
  modified_base 20: mod_base = OTHER; note = 2'-deoxythymidine-3'-phosphorothioate
  misc_feature 1..19: note = RNA
  misc_feature 20..21: note = DNA
cggaagttgccggcagcggtt

SEQ ID NO: 521 - DNA, 21 bp, synthetic construct
  source 1..21: mol_type = other DNA
  modified_base 1: mod_base = OTHER; note = 2'-O-methylcytidine-3'-phosphate
  modified_base 2: mod_base = OTHER; note = 2'-O-methylcytidine-3'-phosphate
  modified_base 3: mod_base = OTHER; note = guanosine-3'-phosphate
  modified_base 4: mod_base = OTHER; note = 2'-O-methylcytidine-3'-phosphate
  modified_base 5: mod_base = OTHER; note = 2'-O-methyluridine-3'-phosphate
  modified_base 6: mod_base = OTHER; note = guanosine-3'-phosphate
  modified_base 7: mod_base = OTHER; note = 2'-O-methylcytidine-3'-phosphate
  modified_base 8: mod_base = OTHER; note = 2'-O-methylcytidine-3'-phosphate
  modified_base 9: mod_base = OTHER; note = guanosine-3'-phosphate
  modified_base 10: mod_base = OTHER; note = guanosine-3'-phosphate
  modified_base 11: mod_base = OTHER; note = 2'-O-methylcytidine-3'-phosphate
  modified_base 12: mod_base = OTHER; note = adenosine-3'-phosphate
  modified_base 13: mod_base = OTHER; note = adenosine-3'-phosphate
  modified_base 14: mod_base = OTHER; note = 2'-O-methylcytidine-3'-phosphate
  modified_base 15: mod_base = OTHER; note = 2'-O-methyluridine-3'-phosphate
  modified_base 16: mod_base = OTHER; note = 2'-O-methyluridine-3'-phosphate
  modified_base 17: mod_base = OTHER; note = 2'-O-methylcytidine-3'-phosphate
  modified_base 18: mod_base = OTHER; note = 2'-O-methylcytidine-3'-phosphate
  modified_base 19: mod_base = OTHER; note = guanosine-3'-phosphate
  modified_base 20: mod_base = OTHER; note = 2'-deoxythymidine-3'-phosphorothioate
  misc_feature 1..19: note = RNA
  misc_feature 20..21: note = DNA
ccgctgccggcaacttccgtt

SEQ ID NO: 522 - DNA, 21 bp, synthetic construct
  source 1..21: mol_type = other DNA
  modified_base 1: mod_base = OTHER; note = cytidine-3'-phosphate
  modified_base 2: mod_base = OTHER; note = guanosine-3'-phosphate
  modified_base 3: mod_base = OTHER; note = guanosine-3'-phosphate
  modified_base 4: mod_base = OTHER; note = adenosine-3'-phosphate
  modified_base 5: mod_base = OTHER; note = adenosine-3'-phosphate
  modified_base 6: mod_base = OTHER; note = guanosine-3'-phosphate
  modified_base 7: mod_base = OTHER; note = uridine-3'-phosphate
  modified_base 8: mod_base = OTHER; note = uridine-3'-phosphate
  modified_base 9: mod_base = OTHER; note = guanosine-3'-phosphate
  modified_base 10: mod_base = OTHER; note = cytidine-3'-phosphate
  modified_base 11: mod_base = OTHER; note = cytidine-3'-phosphate
  modified_base 12: mod_base = OTHER; note = guanosine-3'-phosphate
  modified_base 13: mod_base = OTHER; note = guanosine-3'-phosphate
  modified_base 14: mod_base = OTHER; note = 2'-O-methylcytidine-3'-phosphate
  modified_base 15: mod_base = OTHER; note = adenosine-3'-phosphate
  modified_base 16: mod_base = OTHER; note = guanosine-3'-phosphate
  modified_base 17: mod_base = OTHER; note = cytidine-3'-phosphate
  modified_base 18: mod_base = OTHER; note = guanosine-3'-phosphate
  modified_base 19: mod_base = OTHER; note = guanosine-3'-phosphate
  modified_base 20: mod_base = OTHER; note = 2'-deoxythymidine-3'-phosphorothioate
  misc_feature 1..19: note = RNA
  misc_feature 20..21: note = DNA
cggaagttgccggcagcggtt

SEQ ID NO: 523 - DNA, 21 bp, synthetic construct
  source 1..21: mol_type = other DNA
  modified_base 1: mod_base = OTHER; note = cytidine-3'-phosphate
  modified_base 2: mod_base = OTHER; note = guanosine-3'-phosphate
  modified_base 3: mod_base = OTHER; note = cytidine-3'-phosphate
  modified_base 4: mod_base = OTHER; note = uridine-3'-phosphate
  modified_base 5: mod_base = OTHER; note = guanosine-3'-phosphate
  modified_base 6: mod_base = OTHER; note = cytidine-3'-phosphate
  modified_base 7: mod_base = OTHER; note = cytidine-3'-phosphate
  modified_base 8: mod_base = OTHER; note = guanosine-3'-phosphate
  modified_base 9: mod_base = OTHER; note = guanosine-3'-phosphate
  modified_base 10: mod_base = OTHER; note = cytidine-3'-phosphate
  modified_base 11: mod_base = OTHER; note = adenosine-3'-phosphate
  modified_base 12: mod_base = OTHER; note = adenosine-3'-phosphate
  modified_base 13: mod_base = OTHER; note = cytidine-3'-phosphate
  modified_base 14: mod_base = OTHER; note = uridine-3'-phosphate
  modified_base 15: mod_base = OTHER; note = uridine-3'-phosphate
  modified_base 16: mod_base = OTHER; note = cytidine-3'-phosphate
  modified_base 17: mod_base = OTHER; note = cytidine-3'-phosphate
  modified_base 18: mod_base = OTHER; note = guanosine-3'-phosphate
  modified_base 19: mod_base = OTHER; note = guanosine-3'-phosphate
  modified_base 20: mod_base = OTHER; note = 2'-deoxythymidine-3'-phosphorothioate
  misc_feature 1..19: note = RNA
  misc_feature 20..21: note = DNA
cgctgccggcaacttccggtt

SEQ ID NO: 524 - DNA, 21 bp, synthetic construct
  source 1..21: mol_type = other DNA
  modified_base 1: mod_base = OTHER; note = cytidine-3'-phosphate
  modified_base 2: mod_base = OTHER; note = cytidine-3'-phosphate
  modified_base 3: mod_base = OTHER; note = guanosine-3'-phosphate
  modified_base 4: mod_base = OTHER; note = guanosine-3'-phosphate
  modified_base 5: mod_base = OTHER; note = adenosine-3'-phosphate
  modified_base 6: mod_base = OTHER; note = adenosine-3'-phosphate
  modified_base 7: mod_base = OTHER; note = guanosine-3'-phosphate
  modified_base 8: mod_base = OTHER; note = uridine-3'-phosphate
  modified_base 9: mod_base = OTHER; note = uridine-3'-phosphate
  modified_base 10: mod_base = OTHER; note = guanosine-3'-phosphate
  modified_base 11: mod_base = OTHER; note = cytidine-3'-phosphate
  modified_base 12: mod_base = OTHER; note = cytidine-3'-phosphate
  modified_base 13: mod_base = OTHER; note = guanosine-3'-phosphate
  modified_base 14: mod_base = OTHER; note = guanosine-3'-phosphate
  modified_base 15: mod_base = OTHER; note = cytidine-3'-phosphate
  modified_base 16: mod_base = OTHER; note = adenosine-3'-phosphate
  modified_base 17: mod_base = OTHER; note = guanosine-3'-phosphate
  modified_base 18: mod_base = OTHER; note = cytidine-3'-phosphate
  modified_base 19: mod_base = OTHER; note = guanosine-3'-phosphate
  modified_base 20: mod_base = OTHER; note = 2'-deoxythymidine-3'-phosphorothioate
  misc_feature 1..19: note = RNA
  misc_feature 20..21: note = DNA
ccggaagttgccggcagcgtt

SEQ ID NO: 525 - DNA, 21 bp, synthetic construct
  source 1..21: mol_type = other DNA
  modified_base 1: mod_base = OTHER; note = 2'-O-methylcytidine-3'-phosphate
  modified_base 2: mod_base = OTHER; note = guanosine-3'-phosphate
  modified_base 3: mod_base = OTHER; note = 2'-O-methylcytidine-3'-phosphate
  modified_base 4: mod_base = OTHER; note = 2'-O-methyluridine-3'-phosphate
  modified_base 5: mod_base = OTHER; note = guanosine-3'-phosphate
  modified_base 6: mod_base = OTHER; note = 2'-O-methylcytidine-3'-phosphate
  modified_base 7: mod_base = OTHER; note = 2'-O-methylcytidine-3'-phosphate
  modified_base 8: mod_base = OTHER; note = guanosine-3'-phosphate
  modified_base 9: mod_base = OTHER; note = guanosine-3'-phosphate
  modified_base 10: mod_base = OTHER; note = 2'-O-methylcytidine-3'-phosphate
  modified_base 11: mod_base = OTHER; note = adenosine-3'-phosphate
  modified_base 12: mod_base = OTHER; note = adenosine-3'-phosphate
  modified_base 13: mod_base = OTHER; note = 2'-O-methylcytidine-3'-phosphate
  modified_base 14: mod_base = OTHER; note = 2'-O-methyluridine-3'-phosphate
  modified_base 15: mod_base = OTHER; note = 2'-O-methyluridine-3'-phosphate
  modified_base 16: mod_base = OTHER; note = 2'-O-methylcytidine-3'-phosphate
  modified_base 17: mod_base = OTHER; note = 2'-O-methylcytidine-3'-phosphate
  modified_base 18: mod_base = OTHER; note = guanosine-3'-phosphate
  modified_base 19: mod_base = OTHER; note = guanosine-3'-phosphate
  modified_base 20: mod_base = OTHER; note = 2'-deoxythymidine-3'-phosphorothioate
  misc_feature 1..19: note = RNA
  misc_feature 20..21: note = DNA
cgctgccggcaacttccggtt

SEQ ID NO: 526 - DNA, 21 bp, synthetic construct
  source 1..21: mol_type = other DNA
  modified_base 1: mod_base = OTHER; note = cytidine-3'-phosphate
  modified_base 2: mod_base = OTHER; note = cytidine-3'-phosphate
  modified_base 3: mod_base = OTHER; note = guanosine-3'-phosphate
  modified_base 4: mod_base = OTHER; note = guanosine-3'-phosphate
  modified_base 5: mod_base = OTHER; note = adenosine-3'-phosphate
  modified_base 6: mod_base = OTHER; note = adenosine-3'-phosphate
  modified_base 7: mod_base = OTHER; note = guanosine-3'-phosphate
  modified_base 8: mod_base = OTHER; note = uridine-3'-phosphate
  modified_base 9: mod_base = OTHER; note = uridine-3'-phosphate
  modified_base 10: mod_base = OTHER; note = guanosine-3'-phosphate
  modified_base 11: mod_base = OTHER; note = cytidine-3'-phosphate
  modified_base 12: mod_base = OTHER; note = cytidine-3'-phosphate
  modified_base 13: mod_base = OTHER; note = guanosine-3'-phosphate
  modified_base 14: mod_base = OTHER; note = guanosine-3'-phosphate
  modified_base 15: mod_base = OTHER; note = 2'-O-methylcytidine-3'-phosphate
  modified_base 16: mod_base = OTHER; note = adenosine-3'-phosphate
  modified_base 17: mod_base = OTHER; note = guanosine-3'-phosphate
  modified_base 18: mod_base = OTHER; note = cytidine-3'-phosphate
  modified_base 19: mod_base = OTHER; note = guanosine-3'-phosphate
  modified_base 20: mod_base = OTHER; note = 2'-deoxythymidine-3'-phosphorothioate
  misc_feature 1..19: note = RNA
  misc_feature 20..21: note = DNA
ccggaagttgccggcagcgtt

SEQ ID NO: 527 - DNA, 21 bp, synthetic construct
  source 1..21: mol_type = other DNA
  modified_base 1: mod_base = OTHER; note = guanosine-3'-phosphate
  modified_base 2: mod_base = OTHER; note = cytidine-3'-phosphate
  modified_base 3: mod_base = OTHER; note = uridine-3'-phosphate
  modified_base 4: mod_base = OTHER; note = guanosine-3'-phosphate
  modified_base 5: mod_base = OTHER; note = cytidine-3'-phosphate
  modified_base 6: mod_base = OTHER; note = cytidine-3'-phosphate
  modified_base 7: mod_base = OTHER; note = guanosine-3'-phosphate
  modified_base 8: mod_base = OTHER; note = guanosine-3'-phosphate
  modified_base 9: mod_base = OTHER; note = cytidine-3'-phosphate
  modified_base 10: mod_base = OTHER; note = adenosine-3'-phosphate
  modified_base 11: mod_base = OTHER; note = adenosine-3'-phosphate
  modified_base 12: mod_base = OTHER; note = cytidine-3'-phosphate
  modified_base 13: mod_base = OTHER; note = uridine-3'-phosphate
  modified_base 14: mod_base = OTHER; note = uridine-3'-phosphate
  modified_base 15: mod_base = OTHER; note = cytidine-3'-phosphate
  modified_base 16: mod_base = OTHER; note = cytidine-3'-phosphate
  modified_base 17: mod_base = OTHER; note = guanosine-3'-phosphate
  modified_base 18: mod_base = OTHER; note = guanosine-3'-phosphate
  modified_base 19: mod_base = OTHER; note = guanosine-3'-phosphate
  modified_base 20: mod_base = OTHER; note = 2'-deoxythymidine-3'-phosphorothioate
  misc_feature 1..19: note = RNA
  misc_feature 20..21: note = DNA
gctgccggcaacttccgggtt

SEQ ID NO: 528 - DNA, 21 bp, synthetic construct
  source 1..21: mol_type = other DNA
  modified_base 1: mod_base = OTHER; note = cytidine-3'-phosphate
  modified_base 2: mod_base = OTHER; note = cytidine-3'-phosphate
  modified_base 3: mod_base = OTHER; note = cytidine-3'-phosphate
  modified_base 4: mod_base = OTHER; note = guanosine-3'-phosphate
  modified_base 5: mod_base = OTHER; note = guanosine-3'-phosphate
  modified_base 6: mod_base = OTHER; note = adenosine-3'-phosphate
  modified_base 7: mod_base = OTHER; note = adenosine-3'-phosphate
  modified_base 8: mod_base = OTHER; note = guanosine-3'-phosphate
  modified_base 9: mod_base = OTHER; note = uridine-3'-phosphate
  modified_base 10: mod_base = OTHER; note = uridine-3'-phosphate
  modified_base 11: mod_base = OTHER; note = guanosine-3'-phosphate
  modified_base 12: mod_base = OTHER; note = cytidine-3'-phosphate
  modified_base 13: mod_base = OTHER; note = cytidine-3'-phosphate
  modified_base 14: mod_base = OTHER; note = guanosine-3'-phosphate
  modified_base 15: mod_base = OTHER; note = guanosine-3'-phosphate
  modified_base 16: mod_base = OTHER; note = cytidine-3'-phosphate
  modified_base 17: mod_base = OTHER; note = adenosine-3'-phosphate
  modified_base 18: mod_base = OTHER; note = guanosine-3'-phosphate
  modified_base 19: mod_base = OTHER; note = cytidine-3'-phosphate
  modified_base 20: mod_base = OTHER; note = 2'-deoxythymidine-3'-phosphorothioate
  misc_feature 1..19: note = RNA
  misc_feature 20..21: note = DNA
cccggaagttgccggcagctt

SEQ ID NO: 529 - DNA, 21 bp, synthetic construct
  source 1..21: mol_type = other DNA
  modified_base 1: mod_base = OTHER; note = guanosine-3'-phosphate
  modified_base 2: mod_base = OTHER; note = 2'-O-methylcytidine-3'-phosphate
  modified_base 3: mod_base = OTHER; note = 2'-O-methyluridine-3'-phosphate
  modified_base 4: mod_base = OTHER; note = guanosine-3'-phosphate
  modified_base 5: mod_base = OTHER; note = 2'-O-methylcytidine-3'-phosphate
  modified_base 6: mod_base = OTHER; note = 2'-O-methylcytidine-3'-phosphate
  modified_base 7: mod_base = OTHER; note = guanosine-3'-phosphate
  modified_base 8: mod_base = OTHER; note = guanosine-3'-phosphate
  modified_base 9: mod_base = OTHER; note = 2'-O-methylcytidine-3'-phosphate
  modified_base 10: mod_base = OTHER; note = adenosine-3'-phosphate
  modified_base 11: mod_base = OTHER; note = adenosine-3'-phosphate
  modified_base 12: mod_base = OTHER; note = 2'-O-methylcytidine-3'-phosphate
  modified_base 13: mod_base = OTHER; note = 2'-O-methyluridine-3'-phosphate
  modified_base 14: mod_base = OTHER; note = 2'-O-methyluridine-3'-phosphate
  modified_base 15: mod_base = OTHER; note = 2'-O-methylcytidine-3'-phosphate
  modified_base 16: mod_base = OTHER; note = 2'-O-methylcytidine-3'-phosphate
  modified_base 17: mod_base = OTHER; note = guanosine-3'-phosphate
  modified_base 18: mod_base = OTHER; note = guanosine-3'-phosphate
  modified_base 19: mod_base = OTHER; note = guanosine-3'-phosphate
  modified_base 20: mod_base = OTHER; note = 2'-deoxythymidine-3'-phosphorothioate
  misc_feature 1..19: note = RNA
  misc_feature 20..21: note = DNA
gctgccggcaacttccgggtt

SEQ ID NO: 530 - DNA, 21 bp, synthetic construct
  source 1..21: mol_type = other DNA
  modified_base 1: mod_base = OTHER; note = cytidine-3'-phosphate
  modified_base 2: mod_base = OTHER; note = cytidine-3'-phosphate
  modified_base 3: mod_base = OTHER; note = cytidine-3'-phosphate
  modified_base 4: mod_base = OTHER; note = guanosine-3'-phosphate
  modified_base 5: mod_base = OTHER; note = guanosine-3'-phosphate
  modified_base 6: mod_base = OTHER; note = adenosine-3'-phosphate
  modified_base 7: mod_base = OTHER; note = adenosine-3'-phosphate
  modified_base 8: mod_base = OTHER; note = guanosine-3'-phosphate
  modified_base 9: mod_base = OTHER; note = uridine-3'-phosphate
  modified_base 10: mod_base = OTHER; note = uridine-3'-phosphate
  modified_base 11: mod_base = OTHER; note = guanosine-3'-phosphate
  modified_base 12: mod_base = OTHER; note = cytidine-3'-phosphate
  modified_base 13: mod_base = OTHER; note = cytidine-3'-phosphate
  modified_base 14: mod_base = OTHER; note = guanosine-3'-phosphate
  modified_base 15: mod_base = OTHER; note = guanosine-3'-phosphate
  modified_base 16: mod_base = OTHER; note = 2'-O-methylcytidine-3'-phosphate
  modified_base 17: mod_base = OTHER; note = adenosine-3'-phosphate
  modified_base 18: mod_base = OTHER; note = guanosine-3'-phosphate
  modified_base 19: mod_base = OTHER; note = cytidine-3'-phosphate
  modified_base 20: mod_base = OTHER; note = 2'-deoxythymidine-3'-phosphorothioate
  misc_feature 1..19: note = RNA
  misc_feature 20..21: note = DNA
cccggaagttgccggcagctt

SEQ ID NO: 531 - DNA, 21 bp, synthetic construct
  source 1..21: mol_type = other DNA
  modified_base 1: mod_base = OTHER; note = cytidine-3'-phosphate
  modified_base 2: mod_base = OTHER; note = guanosine-3'-phosphate
  modified_base 3: mod_base = OTHER; note = guanosine-3'-phosphate
  modified_base 4: mod_base = OTHER; note = cytidine-3'-phosphate
  modified_base 5: mod_base = OTHER; note = adenosine-3'-phosphate
  modified_base 6: mod_base = OTHER; note = adenosine-3'-phosphate
  modified_base 7: mod_base = OTHER; note = cytidine-3'-phosphate
  modified_base 8: mod_base = OTHER; note = uridine-3'-phosphate
  modified_base 9: mod_base = OTHER; note = uridine-3'-phosphate
  modified_base 10: mod_base = OTHER; note = cytidine-3'-phosphate
  modified_base 11: mod_base = OTHER; note = cytidine-3'-phosphate
  modified_base 12: mod_base = OTHER; note = guanosine-3'-phosphate
  modified_base 13: mod_base = OTHER; note = guanosine-3'-phosphate
  modified_base 14: mod_base = OTHER; note = guanosine-3'-phosphate
  modified_base 15: mod_base = OTHER; note = adenosine-3'-phosphate
  modified_base 16: mod_base = OTHER; note = cytidine-3'-phosphate
  modified_base 17: mod_base = OTHER; note = guanosine-3'-phosphate
  modified_base 18: mod_base = OTHER; note = adenosine-3'-phosphate
  modified_base 19: mod_base = OTHER; note = uridine-3'-phosphate
  modified_base 20: mod_base = OTHER; note = 2'-deoxythymidine-3'-phosphorothioate
  misc_feature 1..19: note = RNA
  misc_feature 20..21: note = DNA
cggcaacttccgggacgattt

SEQ ID NO: 532 - DNA, 21 bp, synthetic construct
  source 1..21: mol_type = other DNA
  modified_base 1: mod_base = OTHER; note = adenosine-3'-phosphate
  modified_base 2: mod_base = OTHER; note = uridine-3'-phosphate
  modified_base 3: mod_base = OTHER; note = cytidine-3'-phosphate
  modified_base 4: mod_base = OTHER; note = guanosine-3'-phosphate
  modified_base 5: mod_base = OTHER; note = uridine-3'-phosphate
  modified_base 6: mod_base = OTHER; note = cytidine-3'-phosphate
  modified_base 7: mod_base = OTHER; note = cytidine-3'-phosphate
  modified_base 8: mod_base = OTHER; note = cytidine-3'-phosphate
  modified_base 9: mod_base = OTHER; note = guanosine-3'-phosphate
  modified_base 10: mod_base = OTHER; note = guanosine-3'-phosphate
  modified_base 11: mod_base = OTHER; note = adenosine-3'-phosphate
  modified_base 12: mod_base = OTHER; note = adenosine-3'-phosphate
  modified_base 13: mod_base = OTHER; note = guanosine-3'-phosphate
  modified_base 14: mod_base = OTHER; note = uridine-3'-phosphate
  modified_base 15: mod_base = OTHER; note = uridine-3'-phosphate
  modified_base 16: mod_base = OTHER; note = guanosine-3'-phosphate
  modified_base 17: mod_base = OTHER; note = cytidine-3'-phosphate
  modified_base 18: mod_base = OTHER; note = cytidine-3'-phosphate
  modified_base 19: mod_base = OTHER; note = guanosine-3'-phosphate
  modified_base 20: mod_base = OTHER; note = 2'-deoxythymidine-3'-phosphorothioate
  misc_feature 1..19: note = RNA
  misc_feature 20..21: note = DNA
atcgtcccggaagttgccgtt

SEQ ID NO: 533 - DNA, 21 bp, synthetic construct
  source 1..21: mol_type = other DNA
  modified_base 1: mod_base = OTHER; note = 2'-O-methylcytidine-3'-phosphate
  modified_base 2: mod_base = OTHER; note = guanosine-3'-phosphate
  modified_base 3: mod_base = OTHER; note = guanosine-3'-phosphate
  modified_base 4: mod_base = OTHER; note = 2'-O-methylcytidine-3'-phosphate
  modified_base 5: mod_base = OTHER; note = adenosine-3'-phosphate
  modified_base 6: mod_base = OTHER; note = adenosine-3'-phosphate
  modified_base 7: mod_base = OTHER; note = 2'-O-methylcytidine-3'-phosphate
  modified_base 8: mod_base = OTHER; note = 2'-O-methyluridine-3'-phosphate
  modified_base 9: mod_base = OTHER; note = 2'-O-methyluridine-3'-phosphate
  modified_base 10: mod_base = OTHER; note = 2'-O-methylcytidine-3'-phosphate
  modified_base 11: mod_base = OTHER; note = 2'-O-methylcytidine-3'-phosphate
  modified_base 12: mod_base = OTHER; note = guanosine-3'-phosphate
  modified_base 13: mod_base = OTHER; note = guanosine-3'-phosphate
  modified_base 14: mod_base = OTHER; note = guanosine-3'-phosphate
  modified_base 15: mod_base = OTHER; note = adenosine-3'-phosphate
  modified_base 16: mod_base = OTHER; note = 2'-O-methylcytidine-3'-phosphate
  modified_base 17: mod_base = OTHER; note = guanosine-3'-phosphate
  modified_base 18: mod_base = OTHER; note = adenosine-3'-phosphate
  modified_base 19: mod_base = OTHER; note = 2'-O-methyluridine-3'-phosphate
  modified_base 20: mod_base = OTHER; note = 2'-deoxythymidine-3'-phosphorothioate
  misc_feature 1..19: note = RNA
  misc_feature 20..21: note = DNA
cggcaacttccgggacgattt

SEQ ID NO: 534 - DNA, 21 bp, synthetic construct
  source 1..21: mol_type = other DNA
  modified_base 1: mod_base = OTHER; note = adenosine-3'-phosphate
  modified_base 2: mod_base = OTHER; note = uridine-3'-phosphate
  modified_base 3: mod_base = OTHER; note = cytidine-3'-phosphate
  modified_base 4: mod_base = OTHER; note = guanosine-3'-phosphate
  modified_base 5: mod_base = OTHER; note = uridine-3'-phosphate
  modified_base 6: mod_base = OTHER; note = cytidine-3'-phosphate
  modified_base 7: mod_base = OTHER; note = cytidine-3'-phosphate
  modified_base 8: mod_base = OTHER; note = cytidine-3'-phosphate
  modified_base 9: mod_base = OTHER; note = guanosine-3'-phosphate
  modified_base 10: mod_base = OTHER; note = guanosine-3'-phosphate
  modified_base 11: mod_base = OTHER; note = adenosine-3'-phosphate
  modified_base 12: mod_base = OTHER; note = adenosine-3'-phosphate
  modified_base 13: mod_base = OTHER; note = guanosine-3'-phosphate
  modified_base 14: mod_base = OTHER; note = uridine-3'-phosphate
  modified_base 15: mod_base = OTHER; note = uridine-3'-phosphate
  modified_base 16: mod_base = OTHER; note = guanosine-3'-phosphate
  modified_base 17: mod_base = OTHER; note = cytidine-3'-phosphate
  modified_base 18: mod_base = OTHER; note = cytidine-3'-phosphate
  modified_base 19: mod_base = OTHER; note = guanosine-3'-phosphate
  modified_base 20: mod_base = OTHER; note = 2'-deoxythymidine-3'-phosphorothioate
  misc_feature 1..19: note = RNA
  misc_feature 20..21: note = DNA
atcgtcccggaagttgccgtt

SEQ ID NO: 535 - DNA, 21 bp, synthetic construct
  source 1..21: mol_type = other DNA
  modified_base 1: mod_base = OTHER; note = guanosine-3'-phosphate
  modified_base 2: mod_base = OTHER; note = guanosine-3'-phosphate
  modified_base 3: mod_base = OTHER; note = cytidine-3'-phosphate
  modified_base 4: mod_base = OTHER; note = adenosine-3'-phosphate
  modified_base 5: mod_base = OTHER; note = adenosine-3'-phosphate
  modified_base 6: mod_base = OTHER; note = cytidine-3'-phosphate
  modified_base 7: mod_base = OTHER; note = uridine-3'-phosphate
  modified_base 8: mod_base = OTHER; note = uridine-3'-phosphate
  modified_base 9: mod_base = OTHER; note = cytidine-3'-phosphate
  modified_base 10: mod_base = OTHER; note = cytidine-3'-phosphate
  modified_base 11: mod_base = OTHER; note = guanosine-3'-phosphate
  modified_base 12: mod_base = OTHER; note = guanosine-3'-phosphate
  modified_base 13: mod_base = OTHER; note = guanosine-3'-phosphate
  modified_base 14: mod_base = OTHER; note = adenosine-3'-phosphate
  modified_base 15: mod_base = OTHER; note = cytidine-3'-phosphate
  modified_base 16: mod_base = OTHER; note = guanosine-3'-phosphate
  modified_base 17: mod_base = OTHER; note = adenosine-3'-phosphate
  modified_base 18: mod_base = OTHER; note = uridine-3'-phosphate
  modified_base 19: mod_base = OTHER; note = guanosine-3'-phosphate
  modified_base 20: mod_base = OTHER; note = 2'-deoxythymidine-3'-phosphorothioate
  misc_feature 1..19: note = RNA
  misc_feature 20..21: note = DNA
ggcaacttccgggacgatgtt

SEQ ID NO: 536 - DNA, 21 bp, synthetic construct
  source 1..21: mol_type = other DNA
  modified_base 1: mod_base = OTHER; note = cytidine-3'-phosphate
  modified_base 2: mod_base = OTHER; note = adenosine-3'-phosphate
  modified_base 3: mod_base = OTHER; note = uridine-3'-phosphate
  modified_base 4: mod_base = OTHER; note = cytidine-3'-phosphate
  modified_base 5: mod_base = OTHER; note = guanosine-3'-phosphate
  modified_base 6: mod_base = OTHER; note = uridine-3'-phosphate
  modified_base 7: mod_base = OTHER; note = cytidine-3'-phosphate
  modified_base 8: mod_base = OTHER; note = cytidine-3'-phosphate
  modified_base 9: mod_base = OTHER; note = cytidine-3'-phosphate
  modified_base 10: mod_base = OTHER; note = guanosine-3'-phosphate
  modified_base 11: mod_base = OTHER; note = guanosine-3'-phosphate
  modified_base 12: mod_base = OTHER; note = adenosine-3'-phosphate
  modified_base 13: mod_base = OTHER; note = adenosine-3'-phosphate
  modified_base 14: mod_base = OTHER; note = guanosine-3'-phosphate
  modified_base 15: mod_base = OTHER; note = uridine-3'-phosphate
  modified_base 16: mod_base = OTHER; note = uridine-3'-phosphate
  modified_base 17: mod_base = OTHER; note = guanosine-3'-phosphate
  modified_base 18: mod_base = OTHER; note = cytidine-3'-phosphate
  modified_base 19: mod_base = OTHER; note = cytidine-3'-phosphate
  modified_base 20: mod_base = OTHER; note = 2'-deoxythymidine-3'-phosphorothioate
  misc_feature 1..19: note = RNA
  misc_feature 20..21: note = DNA
catcgtcccggaagttgcctt

SEQ ID NO: 537 - DNA, 21 bp, synthetic construct
  source 1..21: mol_type = other DNA
  modified_base 1: mod_base = OTHER; note = guanosine-3'-phosphate
  modified_base 2: mod_base = OTHER; note = guanosine-3'-phosphate
  modified_base 3: mod_base = OTHER; note = 2'-O-methylcytidine-3'-phosphate
  modified_base 4: mod_base = OTHER; note = adenosine-3'-phosphate
  modified_base 5: mod_base = OTHER; note = adenosine-3'-phosphate
  modified_base 6: mod_base = OTHER; note = 2'-O-methylcytidine-3'-phosphate
  modified_base 7: mod_base = OTHER; note = 2'-O-methyluridine-3'-phosphate
  modified_base 8: mod_base = OTHER; note = 2'-O-methyluridine-3'-phosphate
  modified_base 9: mod_base = OTHER; note = 2'-O-methylcytidine-3'-phosphate
  modified_base 10: mod_base = OTHER; note = 2'-O-methylcytidine-3'-phosphate
  modified_base 11: mod_base = OTHER; note = guanosine-3'-phosphate
  modified_base 12: mod_base = OTHER; note = guanosine-3'-phosphate
  modified_base 13: mod_base = OTHER; note = guanosine-3'-phosphate
  modified_base 14: mod_base = OTHER; note = adenosine-3'-phosphate
  modified_base 15: mod_base = OTHER; note = 2'-O-methylcytidine-3'-phosphate
  modified_base 16: mod_base = OTHER; note = guanosine-3'-phosphate
  modified_base 17: mod_base = OTHER; note = adenosine-3'-phosphate
  modified_base 18: mod_base = OTHER; note = 2'-O-methyluridine-3'-phosphate
  modified_base 19: mod_base = OTHER; note = guanosine-3'-phosphate
  modified_base 20: mod_base = OTHER; note = 2'-deoxythymidine-3'-phosphorothioate
  misc_feature 1..19: note = RNA
  misc_feature 20..21: note = DNA
ggcaacttccgggacgatgtt

SEQ ID NO: 538 - DNA, 21 bp, synthetic construct
  source 1..21: mol_type = other DNA
  modified_base 1: mod_base = OTHER; note = 2'-O-methylcytidine-3'-phosphate
  modified_base 2: mod_base = OTHER; note = adenosine-3'-phosphate
  modified_base 3: mod_base = OTHER; note = uridine-3'-phosphate
  modified_base 4: mod_base = OTHER; note = cytidine-3'-phosphate
  modified_base 5: mod_base = OTHER; note = guanosine-3'-phosphate
  modified_base 6: mod_base = OTHER; note = uridine-3'-phosphate
  modified_base 7: mod_base = OTHER; note = cytidine-3'-phosphate
  modified_base 8: mod_base = OTHER; note = cytidine-3'-phosphate
  modified_base 9: mod_base = OTHER; note = cytidine-3'-phosphate
  modified_base 10: mod_base = OTHER; note = guanosine-3'-phosphate
  modified_base 11: mod_base = OTHER; note = guanosine-3'-phosphate
  modified_base 12: mod_base = OTHER; note = adenosine-3'-phosphate
  modified_base 13: mod_base = OTHER; note = adenosine-3'-phosphate
  modified_base 14: mod_base = OTHER; note = guanosine-3'-phosphate
  modified_base 15: mod_base = OTHER; note = uridine-3'-phosphate
  modified_base 16: mod_base = OTHER; note = uridine-3'-phosphate
  modified_base 17: mod_base = OTHER; note = guanosine-3'-phosphate
  modified_base 18: mod_base = OTHER; note = cytidine-3'-phosphate
  modified_base 19: mod_base = OTHER; note = cytidine-3'-phosphate
  modified_base 20: mod_base = OTHER; note = 2'-deoxythymidine-3'-phosphorothioate
  misc_feature 1..19: note = RNA
  misc_feature 20..21: note = DNA
catcgtcccggaagttgcctt

SEQ ID NO: 539 - DNA, 21 bp, synthetic construct
  source 1..21: mol_type = other DNA
  modified_base 1: mod_base = OTHER; note = uridine-3'-phosphate
  modified_base 2: mod_base = OTHER; note = uridine-3'-phosphate
  modified_base 3: mod_base = OTHER; note = cytidine-3'-phosphate
  modified_base 4: mod_base = OTHER; note = cytidine-3'-phosphate
  modified_base 5: mod_base = OTHER; note = guanosine-3'-phosphate
  modified_base 6: mod_base = OTHER; note = guanosine-3'-phosphate
  modified_base 7: mod_base = OTHER; note = guanosine-3'-phosphate
  modified_base 8: mod_base = OTHER; note = adenosine-3'-phosphate
  modified_base 9: mod_base = OTHER; note = cytidine-3'-phosphate
  modified_base 10: mod_base = OTHER; note = guanosine-3'-phosphate
  modified_base 11: mod_base = OTHER; note = adenosine-3'-phosphate
  modified_base 12: mod_base = OTHER; note = uridine-3'-phosphate
  modified_base 13: mod_base = OTHER; note = guanosine-3'-phosphate
  modified_base 14: mod_base = OTHER; note = cytidine-3'-phosphate
  modified_base 15: mod_base = OTHER; note = cytidine-3'-phosphate
  modified_base 16: mod_base = OTHER; note = uridine-3'-phosphate
  modified_base 17: mod_base = OTHER; note = guanosine-3'-phosphate
  modified_base 18: mod_base = OTHER; note = cytidine-3'-phosphate
  modified_base 19: mod_base = OTHER; note = cytidine-3'-phosphate
  modified_base 20: mod_base = OTHER; note = 2'-deoxythymidine-3'-phosphorothioate
  misc_feature 1..19: note = RNA
  misc_feature 20..21: note = DNA
ttccgggacgatgcctgcctt

SEQ ID NO: 540 - DNA, 21 bp, synthetic construct
  source 1..21: mol_type = other DNA
  modified_base 1: mod_base = OTHER; note = guanosine-3'-phosphate
  modified_base 2: mod_base = OTHER; note = guanosine-3'-phosphate
  modified_base 3: mod_base = OTHER; note = cytidine-3'-phosphate
  modified_base 4: mod_base = OTHER; note = adenosine-3'-phosphate
  modified_base 5: mod_base = OTHER; note = guanosine-3'-phosphate
  modified_base 6: mod_base = OTHER; note = guanosine-3'-phosphate
  modified_base 7: mod_base = OTHER; note = cytidine-3'-phosphate
  modified_base 8: mod_base = OTHER; note = adenosine-3'-phosphate
  modified_base 9: mod_base = OTHER; note = uridine-3'-phosphate
  modified_base 10: mod_base = OTHER; note = cytidine-3'-phosphate
  modified_base 11: mod_base = OTHER; note = guanosine-3'-phosphate
  modified_base 12: mod_base = OTHER; note = uridine-3'-phosphate
  modified_base 13: mod_base = OTHER; note = cytidine-3'-phosphate
  modified_base 14: mod_base = OTHER; note = cytidine-3'-phosphate
  modified_base 15: mod_base = OTHER; note = cytidine-3'-phosphate
  modified_base 16: mod_base = OTHER; note = guanosine-3'-phosphate
  modified_base 17: mod_base = OTHER; note = guanosine-3'-phosphate
  modified_base 18: mod_base = OTHER; note = adenosine-3'-phosphate
  modified_base 19: mod_base = OTHER; note = adenosine-3'-phosphate
  modified_base 20: mod_base = OTHER; note = 2'-deoxythymidine-3'-phosphorothioate
  misc_feature 1..19: note = RNA
  misc_feature 20..21: note = DNA
ggcaggcatcgtcccggaatt

SEQ ID NO: 541 - DNA, 21 bp, synthetic construct
  source 1..21: mol_type = other DNA
  modified_base 1: mod_base = OTHER; note = 2'-O-methyluridine-3'-phosphate
  modified_base 2: mod_base = OTHER; note = 2'-O-methyluridine-3'-phosphate
  modified_base 3: mod_base = OTHER; note = 2'-O-methylcytidine-3'-phosphate
  modified_base 4: mod_base = OTHER; note = 2'-O-methylcytidine-3'-phosphate
  modified_base 5: mod_base = OTHER; note = guanosine-3'-phosphate
  modified_base 6: mod_base = OTHER; note = guanosine-3'-phosphate
  modified_base 7: mod_base = OTHER; note = guanosine-3'-phosphate
  modified_base 8: mod_base = OTHER; note = adenosine-3'-phosphate
  modified_base 9: mod_base = OTHER; note = 2'-O-methylcytidine-3'-phosphate
  modified_base 10: mod_base = OTHER; note = guanosine-3'-phosphate
  modified_base 11: mod_base = OTHER; note = adenosine-3'-phosphate
  modified_base 12: mod_base = OTHER; note = 2'-O-methyluridine-3'-phosphate
  modified_base 13: mod_base = OTHER; note = guanosine-3'-phosphate
  modified_base 14: mod_base = OTHER; note = 2'-O-methylcytidine-3'-phosphate
  modified_base 15: mod_base = OTHER; note = 2'-O-methylcytidine-3'-phosphate
  modified_base 16: mod_base = OTHER; note = 2'-O-methyluridine-3'-phosphate
  modified_base 17: mod_base = OTHER; note = guanosine-3'-phosphate
  modified_base 18: mod_base = OTHER; note = 2'-O-methylcytidine-3'-phosphate
  modified_base 19: mod_base = OTHER; note = 2'-O-methylcytidine-3'-phosphate
  modified_base 20: mod_base = OTHER; note = 2'-deoxythymidine-3'-phosphorothioate
  misc_feature 1..19: note = RNA
  misc_feature 20..21: note = DNA
ttccgggacgatgcctgcctt

SEQ ID NO: 542 - DNA, 21 bp, synthetic construct
  source 1..21: mol_type = other DNA
  modified_base 1: mod_base = OTHER; note = guanosine-3'-phosphate
  modified_base 2: mod_base = OTHER; note = guanosine-3'-phosphate
  modified_base 3: mod_base = OTHER; note = 2'-O-methylcytidine-3'-phosphate
  modified_base 4: mod_base = OTHER; note = adenosine-3'-phosphate
  modified_base 5: mod_base = OTHER; note = guanosine-3'-phosphate
  modified_base 6: mod_base = OTHER; note = guanosine-3'-phosphate
  modified_base 7: mod_base = OTHER; note = 2'-O-methylcytidine-3'-phosphate
  modified_base 8: mod_base = OTHER; note = adenosine-3'-phosphate
  modified_base 9: mod_base = OTHER; note = uridine-3'-phosphate
  modified_base 10: mod_base = OTHER; note = cytidine-3'-phosphate
  modified_base 11: mod_base = OTHER; note = guanosine-3'-phosphate
  modified_base 12: mod_base = OTHER; note = uridine-3'-phosphate
  modified_base 13: mod_base = OTHER; note = cytidine-3'-phosphate
  modified_base 14: mod_base = OTHER; note = cytidine-3'-phosphate
  modified_base 15: mod_base = OTHER; note = cytidine-3'-phosphate
  modified_base 16: mod_base = OTHER; note = guanosine-3'-phosphate
  modified_base 17: mod_base = OTHER; note = guanosine-3'-phosphate
  modified_base 18: mod_base = OTHER; note = adenosine-3'-phosphate
  modified_base 19: mod_base = OTHER; note = adenosine-3'-phosphate
  modified_base 20: mod_base = OTHER; note = 2'-deoxythymidine-3'-phosphorothioate
  misc_feature 1..19: note = RNA
  misc_feature 20..21: note = DNA
ggcaggcatcgtcccggaatt

SEQ ID NO: 543 - DNA, 21 bp, synthetic construct
  source 1..21: mol_type = other DNA
  modified_base 1: mod_base = OTHER; note = guanosine-3'-phosphate
  modified_base 2: mod_base = OTHER; note = guanosine-3'-phosphate
  modified_base 3: mod_base = OTHER; note = adenosine-3'-phosphate
  modified_base 4: mod_base = OTHER; note = cytidine-3'-phosphate
  modified_base 5: mod_base = OTHER; note = guanosine-3'-phosphate
  modified_base 6: mod_base = OTHER; note = adenosine-3'-phosphate
  modified_base 7: mod_base = OTHER; note = uridine-3'-phosphate
  modified_base 8: mod_base = OTHER; note = guanosine-3'-phosphate
  modified_base 9: mod_base = OTHER; note = cytidine-3'-phosphate
  modified_base 10: mod_base = OTHER; note = cytidine-3'-phosphate
  modified_base 11: mod_base = OTHER; note = uridine-3'-phosphate
  modified_base 12: mod_base = OTHER; note = guanosine-3'-phosphate
  modified_base 13: mod_base = OTHER; note = cytidine-3'-phosphate
  modified_base 14: mod_base = OTHER; note = cytidine-3'-phosphate
  modified_base 15: mod_base = OTHER; note = uridine-3'-phosphate
  modified_base 16: mod_base = OTHER; note = cytidine-3'-phosphate
  modified_base 17: mod_base = OTHER; note = uridine-3'-phosphate
  modified_base 18: mod_base = OTHER; note = adenosine-3'-phosphate
  modified_base 19: mod_base = OTHER; note = cytidine-3'-phosphate
  modified_base 20: mod_base = OTHER; note = 2'-deoxythymidine-3'-phosphorothioate
  misc_feature 1..19: note = RNA
  misc_feature 20..21: note = DNA
ggacgatgcctgcctctactt

SEQ ID NO: 544 - DNA, 21 bp, synthetic construct
  source 1..21: mol_type = other DNA
  modified_base 1: mod_base = OTHER; note = guanosine-3'-phosphate
  modified_base 2: mod_base = OTHER; note = uridine-3'-phosphate
  modified_base 3: mod_base = OTHER; note = adenosine-3'-phosphate
  modified_base 4: mod_base = OTHER; note = guanosine-3'-phosphate
  modified_base 5: mod_base = OTHER; note = adenosine-3'-phosphate
  modified_base 6: mod_base = OTHER; note = guanosine-3'-phosphate
  modified_base 7: mod_base = OTHER; note = guanosine-3'-phosphate
  modified_base 8: mod_base = OTHER; note = cytidine-3'-phosphate
  modified_base 9: mod_base = OTHER; note = adenosine-3'-phosphate
  modified_base 10: mod_base = OTHER; note = guanosine-3'-phosphate
  modified_base 11: mod_base = OTHER; note = guanosine-3'-phosphate
  modified_base 12: mod_base = OTHER; note = cytidine-3'-phosphate
  modified_base 13: mod_base = OTHER; note = adenosine-3'-phosphate
  modified_base 14: mod_base = OTHER; note = uridine-3'-phosphate
  modified_base 15: mod_base = OTHER; note = cytidine-3'-phosphate
  modified_base 16: mod_base = OTHER; note = guanosine-3'-phosphate
  modified_base 17: mod_base = OTHER; note = uridine-3'-phosphate
  modified_base 18: mod_base = OTHER; note = cytidine-3'-phosphate
  modified_base 19: mod_base = OTHER; note = cytidine-3'-phosphate
  modified_base 20: mod_base = OTHER; note = 2'-deoxythymidine-3'-phosphorothioate
  misc_feature 1..19: note = RNA
  misc_feature 20..21: note = DNA
gtagaggcaggcatcgtcctt

SEQ ID NO: 545 - DNA, 21 bp, synthetic construct
  source 1..21: mol_type = other DNA
  modified_base 1: mod_base = OTHER; note = guanosine-3'-phosphate
  modified_base 2: mod_base = OTHER; note = guanosine-3'-phosphate
  modified_base 3: mod_base = OTHER; note = adenosine-3'-phosphate
  modified_base 4: mod_base = OTHER; note = cytidine-3'-phosphate
  modified_base 5: mod_base = OTHER; note = guanosine-3'-phosphate
  modified_base 6: mod_base = OTHER; note = adenosine-3'-phosphate
  modified_base 7: mod_base = OTHER; note = uridine-3'-phosphate
  modified_base 8: mod_base = OTHER; note = guanosine-3'-phosphate
  modified_base 9: mod_base = OTHER; note = cytidine-3'-phosphate
  modified_base 10: mod_base = OTHER; note = cytidine-3'-phosphate
  modified_base 11: mod_base = OTHER; note = uridine-3'-phosphate
  modified_base 12: mod_base = OTHER; note = guanosine-3'-phosphate
  modified_base 13: mod_base = OTHER; note = cytidine-3'-phosphate
  modified_base 14: mod_base = OTHER; note = cytidine-3'-phosphate
  modified_base 15: mod_base = OTHER; note = uridine-3'-phosphate
  modified_base 16: mod_base = OTHER; note = cytidine-3'-phosphate
  modified_base 17: mod_base = OTHER; note = uridine-3'-phosphate
  modified_base 18: mod_base = OTHER; note = adenosine-3'-phosphate
  modified_base 19: mod_base = OTHER; note = cytidine-3'-phosphate
  modified_base 20: mod_base = OTHER; note = 2'-deoxythymidine-3'-phosphorothioate
  misc_feature 1..19: note = RNA
  misc_feature 20..21: note = DNA
ggacgatgcctgcctctactt

SEQ ID NO: 546 - DNA, 21 bp, synthetic construct
  source 1..21: mol_type = other DNA
  modified_base 1: mod_base = OTHER; note = guanosine-3'-phosphate
  modified_base 2: mod_base = OTHER; note = uridine-3'-phosphate
  modified_base 3: mod_base = OTHER; note = adenosine-3'-phosphate
  modified_base 4: mod_base = OTHER; note = guanosine-3'-phosphate
  modified_base 5: mod_base = OTHER; note = adenosine-3'-phosphate
  modified_base 6: mod_base = OTHER; note = guanosine-3'-phosphate
  modified_base 7: mod_base = OTHER; note = guanosine-3'-phosphate
  modified_base 8: mod_base = OTHER; note = cytidine-3'-phosphate
  modified_base 9: mod_base = OTHER; note = adenosine-3'-phosphate
  modified_base 10: mod_base = OTHER; note = guanosine-3'-phosphate
  modified_base 11: mod_base = OTHER; note = guanosine-3'-phosphate
  modified_base 12: mod_base = OTHER; note = cytidine-3'-phosphate
  modified_base 13: mod_base = OTHER; note = adenosine-3'-phosphate
  modified_base 14: mod_base = OTHER; note = uridine-3'-phosphate
  modified_base 15: mod_base = OTHER; note = cytidine-3'-phosphate
  modified_base 16: mod_base = OTHER; note = guanosine-3'-phosphate
  modified_base 17: mod_base = OTHER; note = uridine-3'-phosphate
  modified_base 18: mod_base = OTHER; note = cytidine-3'-phosphate
  modified_base 19: mod_base = OTHER; note = cytidine-3'-phosphate
  modified_base 20: mod_base = OTHER; note = 2'-deoxythymidine-3'-phosphorothioate
  misc_feature 1..19: note = RNA
  misc_feature 20..21: note = DNA
gtagaggcaggcatcgtcctt

SEQ ID NO: 547 - DNA, 21 bp, synthetic construct
  source 1..21: mol_type = other DNA
  modified_base 1: mod_base = OTHER; note = guanosine-3'-phosphate
  modified_base 2: mod_base = OTHER; note = guanosine-3'-phosphate
  modified_base 3: mod_base = OTHER; note = adenosine-3'-phosphate
  modified_base 4: mod_base = OTHER; note = 2'-O-methylcytidine-3'-phosphate
  modified_base 5: mod_base = OTHER; note = guanosine-3'-phosphate
  modified_base 6: mod_base = OTHER; note = adenosine-3'-phosphate
  modified_base 7: mod_base = OTHER; note = 2'-O-methyluridine-3'-phosphate
  modified_base 8: mod_base = OTHER; note = guanosine-3'-phosphate
  modified_base 9: mod_base = OTHER; note = 2'-O-methylcytidine-3'-phosphate
  modified_base 10: mod_base = OTHER; note = 2'-O-methylcytidine-3'-phosphate
  modified_base 11: mod_base = OTHER; note = 2'-O-methyluridine-3'-phosphate
  modified_base 12: mod_base = OTHER; note = guanosine-3'-phosphate
  modified_base 13: mod_base = OTHER; note = 2'-O-methylcytidine-3'-phosphate
  modified_base 14: mod_base = OTHER; note = 2'-O-methylcytidine-3'-phosphate
  modified_base 15: mod_base = OTHER; note = 2'-O-methyluridine-3'-phosphate
  modified_base 16: mod_base = OTHER; note = 2'-O-methylcytidine-3'-phosphate
  modified_base 17: mod_base = OTHER; note = 2'-O-methyluridine-3'-phosphate
  modified_base 18: mod_base = OTHER; note = adenosine-3'-phosphate
  modified_base 19: mod_base = OTHER; note = 2'-O-methylcytidine-3'-phosphate
  modified_base 20: mod_base = OTHER; note = 2'-deoxythymidine-3'-phosphorothioate
  misc_feature 1..19: note = RNA
  misc_feature 20..21: note = DNA
ggacgatgcctgcctctactt

SEQ ID NO: 548 - DNA, 21 bp, synthetic construct
  source 1..21: mol_type = other DNA
  modified_base 1: mod_base = OTHER; note = guanosine-3'-phosphate
  modified_base 2: mod_base = OTHER; note = 2'-O-methyluridine-3'-phosphate
  modified_base 3: mod_base = OTHER; note = adenosine-3'-phosphate
  modified_base 4: mod_base = OTHER; note = guanosine-3'-phosphate
  modified_base 5: mod_base = OTHER; note = adenosine-3'-phosphate
  modified_base 6: mod_base = OTHER; note = guanosine-3'-phosphate
  modified_base 7: mod_base = OTHER; note = guanosine-3'-phosphate
  modified_base 8: mod_base = OTHER; note = 2'-O-methylcytidine-3'-phosphate
  modified_base 9: mod_base = OTHER; note = adenosine-3'-phosphate
  modified_base 10: mod_base = OTHER; note = guanosine-3'-phosphate
  modified_base 11: mod_base = OTHER; note = guanosine-3'-phosphate
  modified_base 12: mod_base = OTHER; note = 2'-O-methylcytidine-3'-phosphate
  modified_base 13: mod_base = OTHER; note = adenosine-3'-phosphate
  modified_base 14: mod_base = OTHER; note = uridine-3'-phosphate
  modified_base 15: mod_base = OTHER; note = cytidine-3'-phosphate
  modified_base 16: mod_base = OTHER; note = guanosine-3'-phosphate
  modified_base 17: mod_base = OTHER; note = uridine-3'-phosphate
  modified_base 18: mod_base = OTHER; note = cytidine-3'-phosphate
  modified_base 19: mod_base = OTHER; note = cytidine-3'-phosphate
  modified_base 20: mod_base = OTHER; note = 2'-deoxythymidine-3'-phosphorothioate
  misc_feature 1..19: note = RNA
  misc_feature 20..21: note = DNA
gtagaggcaggcatcgtcctt

SEQ ID NO: 549 - DNA, 21 bp, synthetic construct
  source 1..21: mol_type = other DNA
  modified_base 1: mod_base = OTHER; note = guanosine-3'-phosphate
  modified_base 2: mod_base = OTHER; note = cytidine-3'-phosphate
  modified_base 3: mod_base = OTHER; note = uridine-3'-phosphate
  modified_base 4: mod_base = OTHER; note = cytidine-3'-phosphate
  modified_base 5: mod_base = OTHER; note = cytidine-3'-phosphate
  modified_base 6: mod_base = OTHER; note = cytidine-3'-phosphate
  modified_base 7: mod_base = OTHER; note = guanosine-3'-phosphate
  modified_base 8: mod_base = OTHER; note = adenosine-3'-phosphate
  modified_base 9: mod_base = OTHER; note = guanosine-3'-phosphate
  modified_base 10: mod_base = OTHER; note = guanosine-3'-phosphate
  modified_base 11: mod_base = OTHER; note = uridine-3'-phosphate
  modified_base 12: mod_base = OTHER; note = cytidine-3'-phosphate
  modified_base 13: mod_base = OTHER; note = adenosine-3'-phosphate
  modified_base 14: mod_base = OTHER; note = uridine-3'-phosphate
  modified_base 15: mod_base = OTHER; note = cytidine-3'-phosphate
  modified_base 16: mod_base = OTHER; note = adenosine-3'-phosphate
  modified_base 17: mod_base = OTHER; note = cytidine-3'-phosphate
  modified_base 18: mod_base = OTHER; note = adenosine-3'-phosphate
  modified_base 19: mod_base = OTHER; note = guanosine-3'-phosphate
  misc_feature 1..19: note = RNA
  misc_feature 20..21: note = DNA
gctcccgaggtcatcacagtt

SEQ ID NO: 550 - DNA, 21 bp, synthetic construct
  source 1..21: mol_type = other DNA
  modified_base 1: mod_base = OTHER; note = cytidine-3'-phosphate
  modified_base 2: mod_base = OTHER; note = uridine-3'-phosphate
  modified_base 3: mod_base = OTHER; note = guanosine-3'-phosphate
  modified_base 4: mod_base = OTHER; note = uridine-3'-phosphate
  modified_base 5: mod_base = OTHER; note = guanosine-3'-phosphate
  modified_base 6: mod_base = OTHER; note = adenosine-3'-phosphate
  modified_base 7: mod_base = OTHER; note = uridine-3'-phosphate
  modified_base 8: mod_base = OTHER; note = guanosine-3'-phosphate
  modified_base 9: mod_base = OTHER; note = adenosine-3'-phosphate
  modified_base 10: mod_base = OTHER; note = cytidine-3'-phosphate
  modified_base 11: mod_base = OTHER; note = cytidine-3'-phosphate
  modified_base 12: mod_base = OTHER; note = uridine-3'-phosphate
  modified_base 13: mod_base = OTHER; note = cytidine-3'-phosphate
  modified_base 14: mod_base = OTHER; note = guanosine-3'-phosphate
  modified_base 15: mod_base = OTHER; note = guanosine-3'-phosphate
  modified_base 16: mod_base = OTHER; note = guanosine-3'-phosphate
  modified_base 17: mod_base = OTHER; note = adenosine-3'-phosphate
  modified_base 18: mod_base = OTHER; note = guanosine-3'-phosphate
  modified_base 19: mod_base = OTHER; note = cytidine-3'-phosphate
  misc_feature 1..19: note = RNA
  misc_feature 20..21: note = DNA
ctgtgatgacctcgggagctt

SEQ ID NO: 551 - DNA, 21 bp, synthetic construct
  source 1..21: mol_type = other DNA
  modified_base 1: mod_base = OTHER; note = cytidine-3'-phosphate
  modified_base 2: mod_base = OTHER; note = uridine-3'-phosphate
  modified_base 3: mod_base = OTHER; note = cytidine-3'-phosphate
  modified_base 4: mod_base = OTHER; note = cytidine-3'-phosphate
  modified_base 5: mod_base = OTHER; note = cytidine-3'-phosphate
  modified_base 6: mod_base = OTHER; note = guanosine-3'-phosphate
  modified_base 7: mod_base = OTHER; note = adenosine-3'-phosphate
  modified_base 8: mod_base = OTHER; note = guanosine-3'-phosphate
  modified_base 9: mod_base = OTHER; note = guanosine-3'-phosphate
  modified_base 10: mod_base = OTHER; note = uridine-3'-phosphate
  modified_base 11: mod_base = OTHER; note = cytidine-3'-phosphate
  modified_base 12: mod_base = OTHER; note = adenosine-3'-phosphate
  modified_base 13: mod_base = OTHER; note = uridine-3'-phosphate
  modified_base 14: mod_base = OTHER; note = cytidine-3'-phosphate
  modified_base 15: mod_base = OTHER; note = adenosine-3'-phosphate
  modified_base 16: mod_base = OTHER; note = cytidine-3'-phosphate
  modified_base 17: mod_base = OTHER; note = adenosine-3'-phosphate
  modified_base 18: mod_base = OTHER; note = guanosine-3'-phosphate
  modified_base 19: mod_base = OTHER; note = uridine-3'-phosphate
  misc_feature 1..19: note = RNA
  misc_feature 20..21: note = DNA
ctcccgaggtcatcacagttt

SEQ ID NO: 552 - DNA, 21 bp, synthetic construct
  source 1..21: mol_type = other DNA
  modified_base 1: mod_base = OTHER; note = adenosine-3'-phosphate
  modified_base 2: mod_base = OTHER; note = cytidine-3'-phosphate
  modified_base 3: mod_base = OTHER; note = uridine-3'-phosphate
  modified_base 4: mod_base = OTHER; note = guanosine-3'-phosphate
  modified_base 5: mod_base = OTHER; note = uridine-3'-phosphate
  modified_base 6: mod_base = OTHER; note = guanosine-3'-phosphate
  modified_base 7: mod_base = OTHER; note = adenosine-3'-phosphate
  modified_base 8: mod_base = OTHER; note = uridine-3'-phosphate
  modified_base 9: mod_base = OTHER; note = guanosine-3'-phosphate
  modified_base 10: mod_base = OTHER; note = adenosine-3'-phosphate
  modified_base 11: mod_base = OTHER; note = cytidine-3'-phosphate
  modified_base 12: mod_base = OTHER; note = cytidine-3'-phosphate
  modified_base 13: mod_base = OTHER; note = uridine-3'-phosphate
  modified_base 14: mod_base = OTHER; note = cytidine-3'-phosphate
  modified_base 15: mod_base = OTHER; note = guanosine-3'-phosphate
  modified_base 16: mod_base = OTHER; note = guanosine-3'-phosphate
  modified_base 17: mod_base = OTHER; note = guanosine-3'-phosphate
  modified_base 18: mod_base = OTHER; note = adenosine-3'-phosphate
  modified_base 19: mod_base = OTHER; note = guanosine-3'-phosphate
  misc_feature 1..19: note = RNA
  misc_feature 20..21: note = DNA
actgtgatgacctcgggagtt

SEQ ID NO: 553 - DNA, 21 bp, synthetic construct
  source 1..21: mol_type = other DNA
  modified_base 1: mod_base = OTHER; note = uridine-3'-phosphate
  modified_base 2: mod_base = OTHER; note = cytidine-3'-phosphate
  modified_base 3: mod_base = OTHER; note = cytidine-3'-phosphate
  modified_base 4: mod_base = OTHER; note = cytidine-3'-phosphate
  modified_base 5: mod_base = OTHER; note = guanosine-3'-phosphate
  modified_base 6: mod_base = OTHER; note = adenosine-3'-phosphate
  modified_base 7: mod_base = OTHER; note = guanosine-3'-phosphate
  modified_base 8: mod_base = OTHER; note = guanosine-3'-phosphate
  modified_base 9: mod_base = OTHER; note = uridine-3'-phosphate
  modified_base 10: mod_base = OTHER; note = cytidine-3'-phosphate
  modified_base 11: mod_base = OTHER; note = adenosine-3'-phosphate
  modified_base 12: mod_base = OTHER; note = uridine-3'-phosphate
  modified_base 13: mod_base = OTHER; note = cytidine-3'-phosphate
  modified_base 14: mod_base = OTHER; note = adenosine-3'-phosphate
  modified_base 15: mod_base = OTHER; note = cytidine-3'-phosphate
  modified_base 16: mod_base = OTHER; note = adenosine-3'-phosphate
  modified_base 17: mod_base = OTHER; note = guanosine-3'-phosphate
  modified_base 18: mod_base = OTHER; note = uridine-3'-phosphate
  modified_base 19: mod_base = OTHER; note = uridine-3'-phosphate
  misc_feature 1..19: note = RNA
  misc_feature 20..21: note = DNA
tcccgaggtcatcacagtttt

SEQ ID NO: 554 - DNA, 21 bp, synthetic construct
  source 1..21: mol_type = other DNA
  modified_base 1: mod_base = OTHER; note = adenosine-3'-phosphate
  modified_base 2: mod_base = OTHER; note = adenosine-3'-phosphate
  modified_base 3: mod_base = OTHER; note = cytidine-3'-phosphate
  modified_base 4: mod_base = OTHER; note = uridine-3'-phosphate
  modified_base 5: mod_base = OTHER; note = guanosine-3'-phosphate
  modified_base 6: mod_base = OTHER; note = uridine-3'-phosphate
  modified_base 7: mod_base = OTHER; note = guanosine-3'-phosphate
  modified_base 8: mod_base = OTHER; note = adenosine-3'-phosphate
  modified_base 9: mod_base = OTHER; note = uridine-3'-phosphate
  modified_base 10: mod_base = OTHER; note = guanosine-3'-phosphate
  modified_base 11: mod_base = OTHER; note = adenosine-3'-phosphate
  modified_base 12: mod_base = OTHER; note = cytidine-3'-phosphate
  modified_base 13: mod_base = OTHER; note = cytidine-3'-phosphate
  modified_base 14: mod_base = OTHER; note = uridine-3'-phosphate
  modified_base 15: mod_base = OTHER; note = cytidine-3'-phosphate
  modified_base 16: mod_base = OTHER; note = guanosine-3'-phosphate
  modified_base 17: mod_base = OTHER; note = guanosine-3'-phosphate
  modified_base 18: mod_base = OTHER; note = guanosine-3'-phosphate
  modified_base 19: mod_base = OTHER; note = adenosine-3'-phosphate
  misc_feature 1..19: note = RNA
  misc_feature 20..21: note = DNA
aactgtgatgacctcgggatt

SEQ ID NO: 555 - DNA, 21 bp, synthetic construct
  source 1..21: mol_type = other DNA
  modified_base 1: mod_base = OTHER; note = cytidine-3'-phosphate
  modified_base 2: mod_base = OTHER; note = cytidine-3'-phosphate
  modified_base 3: mod_base = OTHER; note = adenosine-3'-phosphate
  modified_base 4: mod_base = OTHER; note = adenosine-3'-phosphate
  modified_base 5: mod_base = OTHER; note = guanosine-3'-phosphate
  modified_base 6: mod_base = OTHER; note = adenosine-3'-phosphate
  modified_base 7: mod_base = OTHER; note = cytidine-3'-phosphate
  modified_base 8: mod_base = OTHER; note = cytidine-3'-phosphate
  modified_base 9: mod_base = OTHER; note = adenosine-3'-phosphate
  modified_base 10: mod_base = OTHER; note = guanosine-3'-phosphate
  modified_base 11: mod_base = OTHER; note = cytidine-3'-phosphate
  modified_base 12: mod_base = OTHER; note = cytidine-3'-phosphate
  modified_base 13: mod_base = OTHER; note = guanosine-3'-phosphate
  modified_base 14: mod_base = OTHER; note = guanosine-3'-phosphate
  modified_base 15: mod_base = OTHER; note = uridine-3'-phosphate
  modified_base 16: mod_base = OTHER; note = guanosine-3'-phosphate
  modified_base 17: mod_base = OTHER; note = adenosine-3'-phosphate
  modified_base 18: mod_base = OTHER; note = cytidine-3'-phosphate
  modified_base 19: mod_base = OTHER; note = cytidine-3'-phosphate
  misc_feature 1..19: note = RNA
  misc_feature 20..21: note = DNA
ccaagaccagccggtgacctt

SEQ ID NO: 556 - DNA, 21 bp, synthetic construct
  source 1..21: mol_type = other DNA
  modified_base 1: mod_base = OTHER; note = guanosine-3'-phosphate
  modified_base 2: mod_base = OTHER; note = guanosine-3'-phosphate
  modified_base 3: mod_base = OTHER; note = uridine-3'-phosphate
  modified_base 4: mod_base = OTHER; note = cytidine-3'-phosphate
  modified_base 5: mod_base = OTHER; note = adenosine-3'-phosphate
  modified_base 6: mod_base = OTHER; note = cytidine-3'-phosphate
  modified_base 7: mod_base = OTHER; note = cytidine-3'-phosphate
  modified_base 8: mod_base = OTHER; note = guanosine-3'-phosphate
  modified_base 9: mod_base = OTHER; note = guanosine-3'-phosphate
  modified_base 10: mod_base = OTHER; note = cytidine-3'-phosphate
  modified_base 11: mod_base = OTHER; note = uridine-3'-phosphate
  modified_base 12: mod_base = OTHER; note = guanosine-3'-phosphate
  modified_base 13: mod_base = OTHER; note = guanosine-3'-phosphate
  modified_base 14: mod_base = OTHER; note = uridine-3'-phosphate
  modified_base 15: mod_base = OTHER; note = cytidine-3'-phosphate
  modified_base 16: mod_base = OTHER; note = uridine-3'-phosphate
  modified_base 17: mod_base = OTHER; note = uridine-3'-phosphate
  modified_base 18: mod_base = OTHER; note = guanosine-3'-phosphate
  modified_base 19: mod_base = OTHER; note = guanosine-3'-phosphate
  misc_feature 1..19: note = RNA
  misc_feature 20..21: note = DNA
ggtcaccggctggtcttggtt

SEQ ID NO: 557 - DNA, 21 bp, synthetic construct
  source 1..21: mol_type = other DNA
  modified_base 1: mod_base = OTHER; note = cytidine-3'-phosphate
  modified_base 2: mod_base = OTHER; note = adenosine-3'-phosphate
  modified_base 3: mod_base = OTHER; note = adenosine-3'-phosphate
  modified_base 4: mod_base = OTHER; note = guanosine-3'-phosphate
  modified_base 5: mod_base = OTHER; note = adenosine-3'-phosphate
  modified_base 6: mod_base = OTHER; note = cytidine-3'-phosphate
  modified_base 7: mod_base = OTHER; note = cytidine-3'-phosphate
  modified_base 8: mod_base = OTHER; note = adenosine-3'-phosphate
  modified_base 9: mod_base = OTHER; note = guanosine-3'-phosphate
  modified_base 10: mod_base = OTHER; note = cytidine-3'-phosphate
  modified_base 11: mod_base = OTHER; note = cytidine-3'-phosphate
  modified_base 12: mod_base = OTHER; note = guanosine-3'-phosphate
  modified_base 13: mod_base = OTHER; note = guanosine-3'-phosphate
  modified_base 14: mod_base = OTHER; note = uridine-3'-phosphate
  modified_base 15: mod_base = OTHER; note = guanosine-3'-phosphate
  modified_base 16: mod_base = OTHER; note = adenosine-3'-phosphate
  modified_base 17: mod_base = OTHER; note = cytidine-3'-phosphate
  modified_base 18: mod_base = OTHER; note = cytidine-3'-phosphate
  modified_base 19: mod_base = OTHER; note = cytidine-3'-phosphate
  misc_feature 1..19: note = RNA
  misc_feature 20..21: note = DNA
caagaccagccggtgaccctt

SEQ ID NO: 558 - DNA, 21 bp, synthetic construct
  source 1..21: mol_type = other DNA
  modified_base 1: mod_base = OTHER; note = guanosine-3'-phosphate
  modified_base 2: mod_base = OTHER; note = guanosine-3'-phosphate
  modified_base 3: mod_base = OTHER; note = guanosine-3'-phosphate
  modified_base 4: mod_base = OTHER; note = uridine-3'-phosphate
  modified_base 5: mod_base = OTHER; note = cytidine-3'-phosphate
  modified_base 6: mod_base = OTHER; note = adenosine-3'-phosphate
  modified_base 7: mod_base = OTHER; note = cytidine-3'-phosphate
  modified_base 8: mod_base = OTHER; note = cytidine-3'-phosphate
  modified_base 9: mod_base = OTHER; note = guanosine-3'-phosphate
  modified_base 10: mod_base = OTHER; note = guanosine-3'-phosphate
  modified_base 11: mod_base = OTHER; note = cytidine-3'-phosphate
  modified_base 12: mod_base = OTHER; note = uridine-3'-phosphate
  modified_base 13: mod_base = OTHER; note = guanosine-3'-phosphate
  modified_base 14: mod_base = OTHER; note = guanosine-3'-phosphate
  modified_base 15: mod_base = OTHER; note = uridine-3'-phosphate
  modified_base 16: mod_base = OTHER; note = cytidine-3'-phosphate
  modified_base 17: mod_base = OTHER; note = uridine-3'-phosphate
  modified_base 18: mod_base = OTHER; note = uridine-3'-phosphate
  modified_base 19: mod_base = OTHER; note = guanosine-3'-phosphate
  misc_feature 1..19: note = RNA
  misc_feature 20..21: note = DNA
gggtcaccggctggtcttgtt

SEQ ID NO: 559 - DNA, 21 bp, synthetic construct
  source 1..21: mol_type = other DNA
  modified_base 1: mod_base = OTHER; note = adenosine-3'-phosphate
  modified_base 2: mod_base = OTHER; note = cytidine-3'-phosphate
  modified_base 3: mod_base = OTHER; note = cytidine-3'-phosphate
  modified_base 4: mod_base = OTHER; note = adenosine-3'-phosphate
  modified_base 5: mod_base = OTHER; note = adenosine-3'-phosphate
  modified_base 6: mod_base = OTHER; note = cytidine-3'-phosphate
  modified_base 7: mod_base = OTHER; note = uridine-3'-phosphate
  modified_base 8: mod_base = OTHER; note = uridine-3'-phosphate
  modified_base 9: mod_base = OTHER; note = uridine-3'-phosphate
  modified_base 10: mod_base = OTHER; note = guanosine-3'-phosphate
  modified_base 11: mod_base = OTHER; note = guanosine-3'-phosphate
  modified_base 12: mod_base = OTHER; note = cytidine-3'-phosphate
  modified_base 13: mod_base = OTHER; note = cytidine-3'-phosphate
  modified_base 14: mod_base = OTHER; note = guanosine-3'-phosphate
  modified_base 15: mod_base = OTHER; note = cytidine-3'-phosphate
  modified_base 16: mod_base = OTHER; note = uridine-3'-phosphate
  modified_base 17: mod_base = OTHER; note = guanosine-3'-phosphate
  modified_base 18: mod_base = OTHER; note = uridine-3'-phosphate
  modified_base 19: mod_base = OTHER; note = guanosine-3'-phosphate
  modified_base 20: mod_base = OTHER; note = 2'-deoxythymidine-3'-phosphorothioate
  misc_feature 1..19: note = RNA
  misc_feature 20..21: note = DNA
accaactttggccgctgtgtt

SEQ ID NO: 560 - DNA, 21 bp, synthetic construct
  source 1..21: mol_type = other DNA
  modified_base 1: mod_base = OTHER; note = cytidine-3'-phosphate
  modified_base 2: mod_base = OTHER; note = adenosine-3'-phosphate
  modified_base 3: mod_base = OTHER; note = cytidine-3'-phosphate
  modified_base 4: mod_base = OTHER; note = adenosine-3'-phosphate
  modified_base 5: mod_base = OTHER; note = guanosine-3'-phosphate
  modified_base 6: mod_base = OTHER; note = cytidine-3'-phosphate
  modified_base 7: mod_base = OTHER; note = guanosine-3'-phosphate
  modified_base 8: mod_base = OTHER; note = guanosine-3'-phosphate
  modified_base 9: mod_base = OTHER; note = cytidine-3'-phosphate
  modified_base 10: mod_base = OTHER; note = cytidine-3'-phosphate
  modified_base 11: mod_base = OTHER; note = adenosine-3'-phosphate
  modified_base 12: mod_base = OTHER; note = adenosine-3'-phosphate
  modified_base 13: mod_base = OTHER; note = adenosine-3'-phosphate
  modified_base 14: mod_base = OTHER; note = guanosine-3'-phosphate
  modified_base 15: mod_base = OTHER; note = uridine-3'-phosphate
  modified_base 16: mod_base = OTHER; note = uridine-3'-phosphate
  modified_base 17: mod_base = OTHER; note = guanosine-3'-phosphate
  modified_base 18: mod_base = OTHER; note = guanosine-3'-phosphate
  modified_base 19: mod_base = OTHER; note = uridine-3'-phosphate
  modified_base 20: mod_base = OTHER; note = 2'-deoxythymidine-3'-phosphorothioate
  misc_feature 1..19: note = RNA
  misc_feature 20..21: note = DNA
cacagcggccaaagttggttt

SEQ ID NO: 561 - DNA, 21 bp, synthetic construct
  source 1..21: mol_type = other DNA
  modified_base 1: mod_base = OTHER; note = adenosine-3'-phosphate
  modified_base 2: mod_base = OTHER; note = 2'-O-methylcytidine-3'-phosphate
  modified_base 3: mod_base = OTHER; note = 2'-O-methylcytidine-3'-phosphate
  modified_base 4: mod_base = OTHER; note = adenosine-3'-phosphate
  modified_base 5: mod_base = OTHER; note = adenosine-3'-phosphate
  modified_base 6: mod_base = OTHER; note = 2'-O-methylcytidine-3'-phosphate
  modified_base 7: mod_base = OTHER; note = 2'-O-methyluridine-3'-phosphate
  modified_base 8: mod_base = OTHER; note = 2'-O-methyluridine-3'-phosphate
  modified_base 9: mod_base = OTHER; note = 2'-O-methyluridine-3'-phosphate
  modified_base 10: mod_base = OTHER; note = guanosine-3'-phosphate
  modified_base 11: mod_base = OTHER; note = guanosine-3'-phosphate
  modified_base 12: mod_base = OTHER; note = 2'-O-methylcytidine-3'-phosphate
  modified_base 13: mod_base = OTHER; note = 2'-O-methylcytidine-3'-phosphate
  modified_base 14: mod_base = OTHER; note = guanosine-3'-phosphate
  modified_base 15: mod_base = OTHER; note = 2'-O-methylcytidine-3'-phosphate
  modified_base 16: mod_base = OTHER; note = 2'-O-methyluridine-3'-phosphate
  modified_base 17: mod_base = OTHER; note = guanosine-3'-phosphate
  modified_base 18: mod_base = OTHER; note = 2'-O-methyluridine-3'-phosphate
  modified_base 19: mod_base = OTHER; note = guanosine-3'-phosphate
  modified_base 20: mod_base = OTHER; note = 2'-deoxythymidine-3'-phosphorothioate
  misc_feature 1..19: note = RNA
  misc_feature 20..21: note = DNA
accaactttggccgctgtgtt

SEQ ID NO: 562 - DNA, 21 bp, synthetic construct
  source 1..21: mol_type = other DNA
  modified_base 1: mod_base = OTHER; note = 2'-O-methylcytidine-3'-phosphate
  modified_base 2: mod_base = OTHER; note = adenosine-3'-phosphate
  modified_base 3: mod_base = OTHER; note = 2'-O-methylcytidine-3'-phosphate
  modified_base 4: mod_base = OTHER; note = adenosine-3'-phosphate
  modified_base 5: mod_base = OTHER; note = guanosine-3'-phosphate
  modified_base 6: mod_base = OTHER; note = cytidine-3'-phosphate
  modified_base 7: mod_base = OTHER; note = guanosine-3'-phosphate
  modified_base 8: mod_base = OTHER; note = guanosine-3'-phosphate
  modified_base 9: mod_base = OTHER; note = cytidine-3'-phosphate
  modified_base 10: mod_base = OTHER; note = 2'-O-methylcytidine-3'-phosphate
  modified_base 11: mod_base = OTHER; note = adenosine-3'-phosphate
  modified_base 12: mod_base = OTHER; note = adenosine-3'-phosphate
  modified_base 13: mod_base = OTHER; note = adenosine-3'-phosphate
  modified_base 14: mod_base = OTHER; note = guanosine-3'-phosphate
  modified_base 15: mod_base = OTHER; note = uridine-3'-phosphate
  modified_base 16: mod_base = OTHER; note = uridine-3'-phosphate
  modified_base 17: mod_base = OTHER; note = guanosine-3'-phosphate
  modified_base 18: mod_base = OTHER; note = guanosine-3'-phosphate
  modified_base 19: mod_base = OTHER; note = uridine-3'-phosphate
  modified_base 20: mod_base = OTHER; note = 2'-deoxythymidine-3'-phosphorothioate
  misc_feature 1..19: note = RNA
  misc_feature 20..21: note = DNA
cacagcggccaaagttggttt

SEQ ID NO: 563 - DNA, 21 bp, synthetic construct
  source 1..21: mol_type = other DNA
  modified_base 1: mod_base = OTHER; note = cytidine-3'-phosphate
  modified_base 2: mod_base = OTHER; note = adenosine-3'-phosphate
  modified_base 3: mod_base = OTHER; note = adenosine-3'-phosphate
  modified_base 4: mod_base = OTHER; note = cytidine-3'-phosphate
  modified_base 5: mod_base = OTHER; note = uridine-3'-phosphate
  modified_base 6: mod_base = OTHER; note = uridine-3'-phosphate
  modified_base 7: mod_base = OTHER; note = uridine-3'-phosphate
  modified_base 8: mod_base = OTHER; note = guanosine-3'-phosphate
  modified_base 9: mod_base = OTHER; note = guanosine-3'-phosphate
  modified_base 10: mod_base = OTHER; note = cytidine-3'-phosphate
  modified_base 11: mod_base = OTHER; note = cytidine-3'-phosphate
  modified_base 12: mod_base = OTHER; note = guanosine-3'-phosphate
  modified_base 13: mod_base = OTHER; note = cytidine-3'-phosphate
  modified_base 14: mod_base = OTHER; note = uridine-3'-phosphate
  modified_base 15: mod_base = OTHER; note = guanosine-3'-phosphate
  modified_base 16: mod_base = OTHER; note = uridine-3'-phosphate
  modified_base 17: mod_base = OTHER; note = guanosine-3'-phosphate
  modified_base 18: mod_base = OTHER; note = uridine-3'-phosphate
  modified_base 19: mod_base = OTHER; note = guanosine-3'-phosphate
  modified_base 20: mod_base = OTHER; note = 2'-deoxythymidine-3'-phosphorothioate
  misc_feature 1..19: note = RNA
  misc_feature 20..21: note = DNA
caactttggccgctgtgtgtt

SEQ ID NO: 564 - DNA, 21 bp, synthetic construct
  source 1..21: mol_type = other DNA
  modified_base 1: mod_base = OTHER; note = cytidine-3'-phosphate
  modified_base 2: mod_base = OTHER; note = adenosine-3'-phosphate
  modified_base 3: mod_base = OTHER; note = cytidine-3'-phosphate
  modified_base 4: mod_base = OTHER; note = adenosine-3'-phosphate
  modified_base 5: mod_base = OTHER; note = cytidine-3'-phosphate
  modified_base 6: mod_base = OTHER; note = adenosine-3'-phosphate
  modified_base 7: mod_base = OTHER; note = guanosine-3'-phosphate
  modified_base 8: mod_base = OTHER; note = cytidine-3'-phosphate
  modified_base 9: mod_base = OTHER; note = guanosine-3'-phosphate
  modified_base 10: mod_base = OTHER; note = guanosine-3'-phosphate
  modified_base 11: mod_base = OTHER; note = cytidine-3'-phosphate
  modified_base 12: mod_base = OTHER; note = cytidine-3'-phosphate
  modified_base 13: mod_base = OTHER; note = adenosine-3'-phosphate
  modified_base 14: mod_base = OTHER; note = adenosine-3'-phosphate
  modified_base 15: mod_base = OTHER; note = adenosine-3'-phosphate
  modified_base 16: mod_base = OTHER; note = guanosine-3'-phosphate
  modified_base 17: mod_base = OTHER; note = uridine-3'-phosphate
  modified_base 18: mod_base = OTHER; note = uridine-3'-phosphate
  modified_base 19: mod_base = OTHER; note = guanosine-3'-phosphate
  modified_base 20: mod_base = OTHER; note = 2'-deoxythymidine-3'-phosphorothioate
  misc_feature 1..19: note = RNA
  misc_feature 20..21: note = DNA
cacacagcggccaaagttgtt

SEQ ID NO: 565 - DNA, 21 bp, synthetic construct
  source 1..21: mol_type = other DNA
  modified_base 1: mod_base = OTHER; note = 2'-O-methylcytidine-3'-phosphate
  modified_base 2: mod_base = OTHER; note = adenosine-3'-phosphate
  modified_base 3: mod_base = OTHER; note = adenosine-3'-phosphate
  modified_base 4: mod_base = OTHER; note = 2'-O-methylcytidine-3'-phosphate
  modified_base 5: mod_base = OTHER; note = 2'-O-methyluridine-3'-phosphate
  modified_base 6: mod_base = OTHER; note = 2'-O-methyluridine-3'-phosphate
  modified_base 7: mod_base = OTHER; note = 2'-O-methyluridine-3'-phosphate
  modified_base 8: mod_base = OTHER; note = guanosine-3'-phosphate
  modified_base 9: mod_base = OTHER; note = guanosine-3'-phosphate
  modified_base 10: mod_base = OTHER; note = 2'-O-methylcytidine-3'-phosphate
  modified_base 11: mod_base = OTHER; note = 2'-O-methylcytidine-3'-phosphate
  modified_base 12: mod_base = OTHER; note = guanosine-3'-phosphate
  modified_base 13: mod_base = OTHER; note = 2'-O-methylcytidine-3'-phosphate
  modified_base 14: mod_base = OTHER; note = 2'-O-methyluridine-3'-phosphate
  modified_base 15: mod_base = OTHER; note = guanosine-3'-phosphate
  modified_base 16: mod_base = OTHER; note = 2'-O-methyluridine-3'-phosphate
  modified_base 17: mod_base = OTHER; note = guanosine-3'-phosphate
  modified_base 18: mod_base = OTHER; note = 2'-O-methyluridine-3'-phosphate
  modified_base 19: mod_base = OTHER; note = guanosine-3'-phosphate
  modified_base 20: mod_base = OTHER; note = 2'-deoxythymidine-3'-phosphorothioate
  misc_feature 1..19: note = RNA
  misc_feature 20..21: note = DNA
caactttggccgctgtgtgtt

SEQ ID NO: 566 - DNA, 21 bp, synthetic construct
  source 1..21: mol_type = other DNA
  modified_base 1: mod_base = OTHER; note = 2'-O-methylcytidine-3'-phosphate
  modified_base 2: mod_base = OTHER; note = adenosine-3'-phosphate
  modified_base 3: mod_base = OTHER; note = 2'-O-methylcytidine-3'-phosphate
  modified_base 4: mod_base = OTHER; note = adenosine-3'-phosphate
  modified_base 5: mod_base = OTHER; note = 2'-O-methylcytidine-3'-phosphate
  modified_base 6: mod_base = OTHER; note = adenosine-3'-phosphate
  modified_base 7: mod_base = OTHER; note = guanosine-3'-phosphate
  modified_base 8: mod_base = OTHER; note = cytidine-3'-phosphate
  modified_base 9: mod_base = OTHER; note = guanosine-3'-phosphate
  modified_base 10: mod_base = OTHER; note = guanosine-3'-phosphate
  modified_base 11: mod_base = OTHER; note = cytidine-3'-phosphate
  modified_base 12: mod_base = OTHER; note = 2'-O-methylcytidine-3'-phosphate
  modified_base 13: mod_base = OTHER; note = adenosine-3'-phosphate
  modified_base 14: mod_base = OTHER; note = adenosine-3'-phosphate
  modified_base 15: mod_base = OTHER; note = adenosine-3'-phosphate
  modified_base 16: mod_base = OTHER; note = guanosine-3'-phosphate
  modified_base 17: mod_base = OTHER; note = uridine-3'-phosphate
  modified_base 18: mod_base = OTHER; note = uridine-3'-phosphate
  modified_base 19: mod_base = OTHER; note = guanosine-3'-phosphate
  modified_base 20: mod_base = OTHER; note = 2'-deoxythymidine-3'-phosphorothioate
  misc_feature 1..19: note = RNA
  misc_feature 20..21: note = DNA
cacacagcggccaaagttgtt

SEQ ID NO: 567 - DNA, 21 bp, synthetic construct
  source 1..21: mol_type = other DNA
  modified_base 1: mod_base = OTHER; note = cytidine-3'-phosphate
  modified_base 2: mod_base = OTHER; note = guanosine-3'-phosphate
  modified_base 3: mod_base = OTHER; note = cytidine-3'-phosphate
  modified_base 4: mod_base = OTHER; note = uridine-3'-phosphate
  modified_base 5: mod_base = OTHER; note = guanosine-3'-phosphate
  modified_base 6: mod_base = OTHER; note = uridine-3'-phosphate
  modified_base 7: mod_base = OTHER; note = guanosine-3'-phosphate
  modified_base 8: mod_base = OTHER; note = uridine-3'-phosphate
  modified_base 9: mod_base = OTHER; note = guanosine-3'-phosphate
  modified_base 10: mod_base = OTHER; note = guanosine-3'-phosphate
  modified_base 11: mod_base = OTHER; note = adenosine-3'-phosphate
  modified_base 12: mod_base = OTHER; note = cytidine-3'-phosphate
  modified_base 13: mod_base = OTHER; note = cytidine-3'-phosphate
  modified_base 14: mod_base = OTHER; note = uridine-3'-phosphate
  modified_base 15: mod_base = OTHER; note = cytidine-3'-phosphate
  modified_base 16: mod_base = OTHER; note = uridine-3'-phosphate
  modified_base 17: mod_base = OTHER; note = uridine-3'-phosphate
  modified_base 18: mod_base = OTHER; note = uridine-3'-phosphate
  modified_base 19: mod_base = OTHER; note = guanosine-3'-phosphate
  modified_base 20: mod_base = OTHER; note = 2'-deoxythymidine-3'-phosphorothioate
  misc_feature 1..19: note = RNA
  misc_feature 20..21: note = DNA
cgctgtgtggacctctttgtt

SEQ ID NO: 568 - DNA, 21 bp, synthetic construct
  source 1..21: mol_type = other DNA
  modified_base 1: mod_base = OTHER; note = cytidine-3'-phosphate
  modified_base 2: mod_base = OTHER; note = adenosine-3'-phosphate
  modified_base 3: mod_base = OTHER; note = adenosine-3'-phosphate
  modified_base 4: mod_base = OTHER; note = adenosine-3'-phosphate
  modified_base 5: mod_base = OTHER; note = guanosine-3'-phosphate
  modified_base 6: mod_base = OTHER; note = adenosine-3'-phosphate
  modified_base 7: mod_base = OTHER; note = guanosine-3'-phosphate
  modified_base 8: mod_base = OTHER; note = guanosine-3'-phosphate
  modified_base 9: mod_base = OTHER; note = uridine-3'-phosphate
  modified_base 10: mod_base = OTHER; note = cytidine-3'-phosphate
  modified_base 11: mod_base = OTHER; note = cytidine-3'-phosphate
  modified_base 12: mod_base = OTHER; note = adenosine-3'-phosphate
  modified_base 13: mod_base = OTHER; note = cytidine-3'-phosphate
  modified_base 14: mod_base = OTHER; note = adenosine-3'-phosphate
  modified_base 15: mod_base = OTHER; note = cytidine-3'-phosphate
  modified_base 16: mod_base = OTHER; note = adenosine-3'-phosphate
  modified_base 17: mod_base = OTHER; note = guanosine-3'-phosphate
  modified_base 18: mod_base = OTHER; note = cytidine-3'-phosphate
  modified_base 19: mod_base = OTHER; note = guanosine-3'-phosphate
  modified_base 20: mod_base = OTHER; note = 2'-deoxythymidine-3'-phosphorothioate
  misc_feature 1..19: note = RNA
  misc_feature 20..21: note = DNA
caaagaggtccacacagcgtt

SEQ ID NO: 569 - DNA, 21 bp, synthetic construct
  source 1..21: mol_type = other DNA
  modified_base 1: mod_base = OTHER; note = 2'-O-methylcytidine-3'-phosphate
  modified_base 2: mod_base = OTHER; note = guanosine-3'-phosphate
  modified_base 3: mod_base = OTHER; note = 2'-O-methylcytidine-3'-phosphate
  modified_base 4: mod_base = OTHER; note = 2'-O-methyluridine-3'-phosphate
  modified_base 5: mod_base = OTHER; note = guanosine-3'-phosphate
  modified_base 6: mod_base = OTHER; note = 2'-O-methyluridine-3'-phosphate
  modified_base 7: mod_base = OTHER; note = guanosine-3'-phosphate
  modified_base 8: mod_base = OTHER; note = 2'-O-methyluridine-3'-phosphate
  modified_base 9: mod_base = OTHER; note = guanosine-3'-phosphate
  modified_base 10: mod_base = OTHER; note = guanosine-3'-phosphate
  modified_base 11: mod_base = OTHER; note = adenosine-3'-phosphate
  modified_base 12: mod_base = OTHER; note = 2'-O-methylcytidine-3'-phosphate
  modified_base 13: mod_base = OTHER; note = 2'-O-methylcytidine-3'-phosphate
  modified_base 14: mod_base = OTHER; note = 2'-O-methyluridine-3'-phosphate
  modified_base 15: mod_base = OTHER; note = 2'-O-methylcytidine-3'-phosphate
  modified_base 16: mod_base = OTHER; note = 2'-O-methyluridine-3'-phosphate
  modified_base 17: mod_base = OTHER; note = 2'-O-methyluridine-3'-phosphate
  modified_base 18: mod_base = OTHER; note = 2'-O-methyluridine-3'-phosphate
  modified_base 19: mod_base = OTHER; note = guanosine-3'-phosphate
  modified_base 20: mod_base = OTHER; note = 2'-deoxythymidine-3'-phosphorothioate
  misc_feature 1..19: note = RNA
  misc_feature 20..21: note = DNA
cgctgtgtggacctctttgtt

SEQ ID NO: 570 - DNA, 21 bp, synthetic construct
  source 1..21: mol_type = other DNA
  modified_base 1: mod_base = OTHER; note = 2'-O-methylcytidine-3'-phosphate
  modified_base 2: mod_base = OTHER; note = adenosine-3'-phosphate
  modified_base 3: mod_base = OTHER; note = adenosine-3'-phosphate
  modified_base 4: mod_base = OTHER; note = adenosine-3'-phosphate
  modified_base 5: mod_base = OTHER; note = guanosine-3'-phosphate
  modified_base 6: mod_base = OTHER; note = adenosine-3'-phosphate
  modified_base 7: mod_base = OTHER; note = guanosine-3'-phosphate
  modified_base 8: mod_base = OTHER; note = guanosine-3'-phosphate
  modified_base 9: mod_base = OTHER; note = uridine-3'-phosphate
  modified_base 10: mod_base = OTHER; note = cytidine-3'-phosphate
  modified_base 11: mod_base = OTHER; note = 2'-O-methylcytidine-3'-phosphate
  modified_base 12: mod_base = OTHER; note = adenosine-3'-phosphate
  modified_base 13: mod_base = OTHER; note = 2'-O-methylcytidine-3'-phosphate
  modified_base 14: mod_base = OTHER; note = adenosine-3'-phosphate
  modified_base 15: mod_base = OTHER; note = 2'-O-methylcytidine-3'-phosphate
  modified_base 16: mod_base = OTHER; note = adenosine-3'-phosphate
  modified_base 17: mod_base = OTHER; note = guanosine-3'-phosphate
  modified_base 18: mod_base = OTHER; note = cytidine-3'-phosphate
  modified_base 19: mod_base = OTHER; note = guanosine-3'-phosphate
  modified_base 20: mod_base = OTHER; note = 2'-deoxythymidine-3'-phosphorothioate
  misc_feature 1..19: note = RNA
  misc_feature 20..21: note = DNA
caaagaggtccacacagcgtt

SEQ ID NO: 571 - DNA, 21 bp, synthetic construct
  source 1..21: mol_type = other DNA
  modified_base 1: mod_base = OTHER; note = guanosine-3'-phosphate
  modified_base 2: mod_base = OTHER; note = adenosine-3'-phosphate
  modified_base 3: mod_base = OTHER; note = cytidine-3'-phosphate
  modified_base 4: mod_base = OTHER; note = adenosine-3'-phosphate
  modified_base 5: mod_base = OTHER; note = uridine-3'-phosphate
  modified_base 6: mod_base = OTHER; note = cytidine-3'-phosphate
  modified_base 7: mod_base = OTHER; note = adenosine-3'-phosphate
  modified_base 8: mod_base = OTHER; note = uridine-3'-phosphate
  modified_base 9: mod_base = OTHER; note = uridine-3'-phosphate
  modified_base 10: mod_base = OTHER; note = guanosine-3'-phosphate
  modified_base 11: mod_base = OTHER; note = guanosine-3'-phosphate
  modified_base 12: mod_base = OTHER; note = uridine-3'-phosphate
  modified_base 13: mod_base = OTHER; note = guanosine-3'-phosphate
  modified_base 14: mod_base = OTHER; note = cytidine-3'-phosphate
  modified_base 15: mod_base = OTHER; note = cytidine-3'-phosphate
  modified_base 16: mod_base = OTHER; note = uridine-3'-phosphate
  modified_base 17: mod_base = OTHER; note = cytidine-3'-phosphate
  modified_base 18: mod_base = OTHER; note = cytidine-3'-phosphate
  modified_base 19: mod_base = OTHER; note = adenosine-3'-phosphate
  modified_base 20: mod_base = OTHER; note = 2'-deoxythymidine-3'-phosphorothioate
  misc_feature 1..19: note = RNA
  misc_feature 20..21: note = DNA
gacatcattggtgcctccatt

SEQ ID NO: 572 - DNA, 21 bp, synthetic construct
  source 1..21: mol_type = other DNA
  modified_base 1: mod_base = OTHER; note = uridine-3'-phosphate
  modified_base 2: mod_base = OTHER; note = guanosine-3'-phosphate
  modified_base 3: mod_base = OTHER; note = guanosine-3'-phosphate
  modified_base 4: mod_base = OTHER; note = adenosine-3'-phosphate
  modified_base 5: mod_base = OTHER; note = guanosine-3'-phosphate
  modified_base 6: mod_base = OTHER; note = guanosine-3'-phosphate
  modified_base 7: mod_base = OTHER; note = cytidine-3'-phosphate
  modified_base 8: mod_base = OTHER; note = adenosine-3'-phosphate
  modified_base 9: mod_base = OTHER; note = cytidine-3'-phosphate
  modified_base 10: mod_base = OTHER; note = cytidine-3'-phosphate
  modified_base 11: mod_base = OTHER; note = adenosine-3'-phosphate
  modified_base 12: mod_base = OTHER; note = adenosine-3'-phosphate
  modified_base 13: mod_base = OTHER; note = uridine-3'-phosphate
  modified_base 14: mod_base = OTHER; note = guanosine-3'-phosphate
  modified_base 15: mod_base = OTHER; note = adenosine-3'-phosphate
  modified_base 16: mod_base = OTHER; note = uridine-3'-phosphate
  modified_base 17: mod_base = OTHER; note = guanosine-3'-phosphate
  modified_base 18: mod_base = OTHER; note = uridine-3'-phosphate
  modified_base 19: mod_base = OTHER; note = cytidine-3'-phosphate
  modified_base 20: mod_base = OTHER; note = 2'-deoxythymidine-3'-phosphorothioate
  misc_feature 1..19: note = RNA
  misc_feature 20..21: note = DNA
tggaggcaccaatgatgtctt

SEQ ID NO: 573 - DNA, 21 bp, synthetic construct
  source 1..21: mol_type = other DNA
  modified_base 1: mod_base = OTHER; note = guanosine-3'-phosphate
  modified_base 2: mod_base = OTHER; note = adenosine-3'-phosphate
  modified_base 3: mod_base = OTHER; note = 2'-O-methylcytidine-3'-phosphate
  modified_base 4: mod_base = OTHER; note = adenosine-3'-phosphate
  modified_base 5: mod_base = OTHER; note = 2'-O-methyluridine-3'-phosphate
  modified_base 6: mod_base = OTHER; note = 2'-O-methylcytidine-3'-phosphate
  modified_base 7: mod_base = OTHER; note = adenosine-3'-phosphate
  modified_base 8: mod_base = OTHER; note = 2'-O-methyluridine-3'-phosphate
  modified_base 9: mod_base = OTHER; note = 2'-O-methyluridine-3'-phosphate
  modified_base 10: mod_base = OTHER; note = guanosine-3'-phosphate
  modified_base 11: mod_base = OTHER; note = guanosine-3'-phosphate
  modified_base 12: mod_base = OTHER; note = 2'-O-methyluridine-3'-phosphate
  modified_base 13: mod_base = OTHER; note = guanosine-3'-phosphate
  modified_base 14: mod_base = OTHER; note = 2'-O-methylcytidine-3'-phosphate
  modified_base 15: mod_base = OTHER; note = 2'-O-methylcytidine-3'-phosphate
  modified_base 16: mod_base = OTHER; note = 2'-O-methyluridine-3'-phosphate
  modified_base 17: mod_base = OTHER; note = 2'-O-methylcytidine-3'-phosphate
  modified_base 18: mod_base = OTHER; note = 2'-O-methylcytidine-3'-phosphate
  modified_base 19: mod_base = OTHER; note = adenosine-3'-phosphate
  modified_base 20: mod_base = OTHER; note = 2'-deoxythymidine-3'-phosphorothioate
  misc_feature 1..19: note = RNA
  misc_feature 20..21: note = DNA
gacatcattggtgcctccatt

SEQ ID NO: 574 - DNA, 21 bp, synthetic construct
  source 1..21: mol_type = other DNA
  modified_base 1: mod_base = OTHER; note = uridine-3'-phosphate
  modified_base 2: mod_base = OTHER; note = guanosine-3'-phosphate
  modified_base 3: mod_base = OTHER; note = guanosine-3'-phosphate
  modified_base 4: mod_base = OTHER; note = adenosine-3'-phosphate
  modified_base 5: mod_base = OTHER; note = guanosine-3'-phosphate
  modified_base 6: mod_base = OTHER; note = guanosine-3'-phosphate
  modified_base 7: mod_base = OTHER; note = 2'-O-methylcytidine-3'-phosphate
  modified_base 8: mod_base = OTHER; note = adenosine-3'-phosphate
  modified_base 9: mod_base = OTHER; note = cytidine-3'-phosphate
  modified_base 10: mod_base = OTHER; note = 2'-O-methylcytidine-3'-phosphate
  modified_base 11: mod_base = OTHER; note = adenosine-3'-phosphate
  modified_base 12: mod_base = OTHER; note = adenosine-3'-phosphate
  modified_base 13: mod_base = OTHER; note = uridine-3'-phosphate
  modified_base 14: mod_base = OTHER; note = guanosine-3'-phosphate
  modified_base 15: mod_base = OTHER; note = adenosine-3'-phosphate
  modified_base 16: mod_base = OTHER; note = uridine-3'-phosphate
  modified_base 17: mod_base = OTHER; note = guanosine-3'-phosphate
  modified_base 18: mod_base = OTHER; note = uridine-3'-phosphate
  modified_base 19: mod_base = OTHER; note = cytidine-3'-phosphate
  modified_base 20: mod_base = OTHER; note = 2'-deoxythymidine-3'-phosphorothioate
  misc_feature 1..19: note = RNA
  misc_feature 20..21: note = DNA
tggaggcaccaatgatgtctt

SEQ ID NO: 575 - DNA, 21 bp, synthetic construct
  source 1..21: mol_type = other DNA
  modified_base 1: mod_base = OTHER; note = uridine-3'-phosphate
  modified_base 2: mod_base = OTHER; note = cytidine-3'-phosphate
  modified_base 3: mod_base = OTHER; note = adenosine-3'-phosphate
  modified_base 4: mod_base = OTHER; note = uridine-3'-phosphate
  modified_base 5: mod_base = OTHER; note = uridine-3'-phosphate
  modified_base 6: mod_base = OTHER; note = guanosine-3'-phosphate
  modified_base 7: mod_base = OTHER; note = guanosine-3'-phosphate
  modified_base 8: mod_base = OTHER; note = uridine-3'-phosphate
  modified_base 9: mod_base = OTHER; note = guanosine-3'-phosphate
  modified_base 10: mod_base = OTHER; note = cytidine-3'-phosphate
  modified_base 11: mod_base = OTHER; note = cytidine-3'-phosphate
  modified_base 12: mod_base = OTHER; note = uridine-3'-phosphate
  modified_base 13: mod_base = OTHER; note = cytidine-3'-phosphate
  modified_base 14: mod_base = OTHER; note = cytidine-3'-phosphate
  modified_base 15: mod_base = OTHER; note = adenosine-3'-phosphate
  modified_base 16: mod_base = OTHER; note = guanosine-3'-phosphate
  modified_base 17: mod_base = OTHER; note = cytidine-3'-phosphate
  modified_base 18: mod_base = OTHER; note = guanosine-3'-phosphate
  modified_base 19: mod_base = OTHER; note = adenosine-3'-phosphate
  modified_base 20: mod_base = OTHER; note = 2'-deoxythymidine-3'-phosphorothioate
  misc_feature 1..19: note = RNA
  misc_feature 20..21: note = DNA
tcattggtgcctccagcgatt

SEQ ID NO: 576 - DNA, 21 bp, synthetic construct
  source 1..21: mol_type = other DNA
  modified_base 1: mod_base = OTHER; note = uridine-3'-phosphate
  modified_base 2: mod_base = OTHER; note = cytidine-3'-phosphate
  modified_base 3: mod_base = OTHER; note = guanosine-3'-phosphate
  modified_base 4: mod_base = OTHER; note = cytidine-3'-phosphate
  modified_base 5: mod_base = OTHER; note = uridine-3'-phosphate
  modified_base 6: mod_base = OTHER; note = guanosine-3'-phosphate
  modified_base 7: mod_base = OTHER; note = guanosine-3'-phosphate
  modified_base 8: mod_base = OTHER; note = adenosine-3'-phosphate
  modified_base 9: mod_base = OTHER; note = guanosine-3'-phosphate
  modified_base 10: mod_base = OTHER; note = guanosine-3'-phosphate
  modified_base 11: mod_base = OTHER; note = cytidine-3'-phosphate
  modified_base 12: mod_base = OTHER; note = adenosine-3'-phosphate
  modified_base 13: mod_base = OTHER; note = cytidine-3'-phosphate
  modified_base 14: mod_base = OTHER; note = cytidine-3'-phosphate
  modified_base 15: mod_base = OTHER; note = adenosine-3'-phosphate
  modified_base 16: mod_base = OTHER; note = adenosine-3'-phosphate
  modified_base 17: mod_base = OTHER; note = uridine-3'-phosphate
  modified_base 18: mod_base = OTHER; note = guanosine-3'-phosphate
  modified_base 19: mod_base = OTHER; note = adenosine-3'-phosphate
  modified_base 20: mod_base = OTHER; note = 2'-deoxythymidine-3'-phosphorothioate
  misc_feature 1..19: note = RNA
  misc_feature 20..21: note = DNA
tcgctggaggcaccaatgatt

SEQ ID NO: 577 - DNA, 21 bp, synthetic construct
  source 1..21: mol_type = other DNA
  modified_base 1: mod_base = OTHER; note = 2'-O-methyluridine-3'-phosphate
  modified_base 2: mod_base = OTHER; note = 2'-O-methylcytidine-3'-phosphate
  modified_base 3: mod_base = OTHER; note = adenosine-3'-phosphate
  modified_base 4: mod_base = OTHER; note = 2'-O-methyluridine-3'-phosphate
  modified_base 5: mod_base = OTHER; note = 2'-O-methyluridine-3'-phosphate
  modified_base 6: mod_base = OTHER; note = guanosine-3'-phosphate
  modified_base 7: mod_base = OTHER; note = guanosine-3'-phosphate
  modified_base 8: mod_base = OTHER; note = 2'-O-methyluridine-3'-phosphate
  modified_base 9: mod_base = OTHER; note = guanosine-3'-phosphate
  modified_base 10: mod_base = OTHER; note = 2'-O-methylcytidine-3'-phosphate
  modified_base 11: mod_base = OTHER; note = 2'-O-methylcytidine-3'-phosphate
  modified_base 12: mod_base = OTHER; note = 2'-O-methyluridine-3'-phosphate
  modified_base 13: mod_base = OTHER; note = 2'-O-methylcytidine-3'-phosphate
  modified_base 14: mod_base = OTHER; note = 2'-O-methylcytidine-3'-phosphate
  modified_base 15: mod_base = OTHER; note = adenosine-3'-phosphate
  modified_base 16: mod_base = OTHER; note = guanosine-3'-phosphate
  modified_base 17: mod_base = OTHER; note = 2'-O-methylcytidine-3'-phosphate
  modified_base 18: mod_base = OTHER; note = guanosine-3'-phosphate
  modified_base 19: mod_base = OTHER; note = adenosine-3'-phosphate
  modified_base 20: mod_base = OTHER; note = 2'-deoxythymidine-3'-phosphorothioate
  misc_feature 1..19: note = RNA
  misc_feature 20..21: note = DNA
tcattggtgcctccagcgatt

SEQ ID NO: 578 - DNA, 21 bp, synthetic construct
  source 1..21: mol_type = other DNA
  modified_base 1: mod_base = OTHER; note = uridine-3'-phosphate
  modified_base 2: mod_base = OTHER; note = cytidine-3'-phosphate
  modified_base 3: mod_base = OTHER; note = guanosine-3'-phosphate
  modified_base 4: mod_base = OTHER; note = cytidine-3'-phosphate
  modified_base 5: mod_base = OTHER; note = uridine-3'-phosphate
  modified_base 6: mod_base = OTHER; note = guanosine-3'-phosphate
  modified_base 7: mod_base = OTHER; note = guanosine-3'-phosphate
  modified_base 8: mod_base = OTHER; note = adenosine-3'-phosphate
  modified_base 9: mod_base = OTHER; note = guanosine-3'-phosphate
  modified_base 10: mod_base = OTHER; note = guanosine-3'-phosphate
  modified_base 11: mod_base = OTHER; note = 2'-O-methylcytidine-3'-phosphate
  modified_base 12: mod_base = OTHER; note = adenosine-3'-phosphate
  modified_base 13: mod_base = OTHER; note = cytidine-3'-phosphate
  modified_base 14: mod_base = OTHER; note = 2'-O-methylcytidine-3'-phosphate
  modified_base 15: mod_base = OTHER; note = adenosine-3'-phosphate
  modified_base 16: mod_base = OTHER; note = adenosine-3'-phosphate
  modified_base 17: mod_base = OTHER; note = uridine-3'-phosphate
  modified_base 18: mod_base = OTHER; note = guanosine-3'-phosphate
  modified_base 19: mod_base = OTHER; note = adenosine-3'-phosphate
  modified_base 20: mod_base = OTHER; note = 2'-deoxythymidine-3'-phosphorothioate
  misc_feature 1..19: note = RNA
  misc_feature 20..21: note = DNA
tcgctggaggcaccaatgatt

SEQ ID NO: 579 - DNA, 21 bp, synthetic construct
  source 1..21: mol_type = other DNA
  modified_base 1: mod_base = OTHER; note = adenosine-3'-phosphate
  modified_base 2: mod_base = OTHER; note = guanosine-3'-phosphate
  modified_base 3: mod_base = OTHER; note = cytidine-3'-phosphate
  modified_base 4: mod_base = OTHER; note = adenosine-3'-phosphate
  modified_base 5: mod_base = OTHER; note = cytidine-3'-phosphate
  modified_base 6: mod_base = OTHER; note = cytidine-3'-phosphate
  modified_base 7: mod_base = OTHER; note = uridine-3'-phosphate
  modified_base 8: mod_base = OTHER; note = guanosine-3'-phosphate
  modified_base 9: mod_base = OTHER; note = cytidine-3'-phosphate
  modified_base 10: mod_base = OTHER; note = uridine-3'-phosphate
  modified_base 11: mod_base = OTHER; note = uridine-3'-phosphate
  modified_base 12: mod_base = OTHER; note = uridine-3'-phosphate
  modified_base 13: mod_base = OTHER; note = guanosine-3'-phosphate
  modified_base 14: mod_base = OTHER; note = uridine-3'-phosphate
  modified_base 15: mod_base = OTHER; note = guanosine-3'-phosphate
  modified_base 16: mod_base = OTHER; note = uridine-3'-phosphate
  modified_base 17: mod_base = OTHER; note = cytidine-3'-phosphate
  modified_base 18: mod_base = OTHER; note = adenosine-3'-phosphate
  modified_base 19: mod_base = OTHER; note = cytidine-3'-phosphate
  modified_base 20: mod_base = OTHER; note = 2'-deoxythymidine-3'-phosphorothioate
  misc_feature 1..19: note = RNA
  misc_feature 20..21: note = DNA
agcacctgctttgtgtcactt

SEQ ID NO: 580 - DNA, 21 bp, synthetic construct
  source 1..21: mol_type = other DNA
  modified_base 1: mod_base = OTHER; note = guanosine-3'-phosphate
  modified_base 2: mod_base = OTHER; note = uridine-3'-phosphate
  modified_base 3: mod_base = OTHER; note = guanosine-3'-phosphate
  modified_base 4: mod_base = OTHER; note = adenosine-3'-phosphate
  modified_base 5: mod_base = OTHER; note = cytidine-3'-phosphate
  modified_base 6: mod_base = OTHER; note = adenosine-3'-phosphate
  modified_base 7: mod_base = OTHER; note = cytidine-3'-phosphate
  modified_base 8: mod_base = OTHER; note = adenosine-3'-phosphate
  modified_base 9: mod_base = OTHER; note = adenosine-3'-phosphate
  modified_base 10: mod_base = OTHER; note = adenosine-3'-phosphate
  modified_base 11: mod_base = OTHER; note = guanosine-3'-phosphate
  modified_base 12: mod_base = OTHER; note = cytidine-3'-phosphate
  modified_base 13: mod_base = OTHER; note = adenosine-3'-phosphate
  modified_base 14: mod_base = OTHER; note = guanosine-3'-phosphate
  modified_base 15: mod_base = OTHER; note = guanosine-3'-phosphate
  modified_base 16: mod_base = OTHER; note = uridine-3'-phosphate
  modified_base 17: mod_base = OTHER; note = guanosine-3'-phosphate
  modified_base 18: mod_base = OTHER; note = cytidine-3'-phosphate
  modified_base 19: mod_base = OTHER; note = uridine-3'-phosphate
  modified_base 20: mod_base = OTHER; note = 2'-deoxythymidine-3'-phosphorothioate
  misc_feature 1..19: note = RNA
  misc_feature 20..21: note = DNA
gtgacacaaagcaggtgcttt

SEQ ID NO: 581 - DNA, 21 bp, synthetic construct
  source 1..21: mol_type = other DNA
  modified_base 1: mod_base = OTHER; note = adenosine-3'-phosphate
  modified_base 2: mod_base = OTHER; note = guanosine-3'-phosphate
  modified_base 3: mod_base = OTHER; note = 2'-O-methylcytidine-3'-phosphate
  modified_base 4: mod_base = OTHER; note = adenosine-3'-phosphate
  modified_base 5: mod_base = OTHER; note = 2'-O-methylcytidine-3'-phosphate
  modified_base 6: mod_base = OTHER; note = 2'-O-methylcytidine-3'-phosphate
  modified_base 7: mod_base = OTHER; note = 2'-O-methyluridine-3'-phosphate
  modified_base 8: mod_base = OTHER; note = guanosine-3'-phosphate
  modified_base 9: mod_base = OTHER; note = 2'-O-methylcytidine-3'-phosphate
  modified_base 10: mod_base = OTHER; note = 2'-O-methyluridine-3'-phosphate
  modified_base 11: mod_base = OTHER; note = 2'-O-methyluridine-3'-phosphate
  modified_base 12: mod_base = OTHER; note = 2'-O-methyluridine-3'-phosphate
  modified_base 13: mod_base = OTHER; note = guanosine-3'-phosphate
  modified_base 14: mod_base = OTHER; note = 2'-O-methyluridine-3'-phosphate
  modified_base 15: mod_base = OTHER; note = guanosine-3'-phosphate
  modified_base 16: mod_base = OTHER; note = 2'-O-methyluridine-3'-phosphate
  modified_base 17: mod_base = OTHER; note = 2'-O-methylcytidine-3'-phosphate
  modified_base 18: mod_base = OTHER; note = adenosine-3'-phosphate
  modified_base 19: mod_base = OTHER; note = 2'-O-methylcytidine-3'-phosphate
  modified_base 20: mod_base = OTHER; note = 2'-deoxythymidine-3'-phosphorothioate
  misc_feature 1..19: note = RNA
  misc_feature 20..21: note = DNA
agcacctgctttgtgtcactt

SEQ ID NO: 582 - DNA, 21 bp, synthetic construct
  source 1..21: mol_type = other DNA
  modified_base 1: mod_base = OTHER; note = guanosine-3'-phosphate
  modified_base 2: mod_base = OTHER; note = uridine-3'-phosphate
  modified_base 3: mod_base = OTHER; note = guanosine-3'-phosphate
  modified_base 4: mod_base = OTHER; note = adenosine-3'-phosphate
  modified_base 5: mod_base = OTHER; note = 2'-O-methylcytidine-3'-phosphate
  modified_base 6: mod_base = OTHER; note = adenosine-3'-phosphate
  modified_base 7: mod_base = OTHER; note = 2'-O-methylcytidine-3'-phosphate
  modified_base 8: mod_base = OTHER; note = adenosine-3'-phosphate
  modified_base 9: mod_base = OTHER; note = adenosine-3'-phosphate
  modified_base 10: mod_base = OTHER; note = adenosine-3'-phosphate
  modified_base 11: mod_base = OTHER; note = guanosine-3'-phosphate
  modified_base 12: mod_base = OTHER; note = 2'-O-methylcytidine-3'-phosphate
  modified_base 13: mod_base = OTHER; note = adenosine-3'-phosphate
  modified_base 14: mod_base = OTHER; note = guanosine-3'-phosphate
  modified_base 15: mod_base = OTHER; note = guanosine-3'-phosphate
  modified_base 16: mod_base = OTHER; note = uridine-3'-phosphate
  modified_base 17: mod_base = OTHER; note = guanosine-3'-phosphate
  modified_base 18: mod_base = OTHER; note = cytidine-3'-phosphate
  modified_base 19: mod_base = OTHER; note = uridine-3'-phosphate
  modified_base 20: mod_base = OTHER; note = 2'-deoxythymidine-3'-phosphorothioate
  misc_feature 1..19: note = RNA
  misc_feature 20..21: note = DNA
gtgacacaaagcaggtgcttt

SEQ ID NO: 583 - DNA, 21 bp, synthetic construct
  source 1..21: mol_type = other DNA
  modified_base 1: mod_base = OTHER; note = cytidine-3'-phosphate
  modified_base 2: mod_base = OTHER; note = adenosine-3'-phosphate
  modified_base 3: mod_base = OTHER; note = cytidine-3'-phosphate
  modified_base 4: mod_base = OTHER; note = adenosine-3'-phosphate
  modified_base 5: mod_base = OTHER; note = guanosine-3'-phosphate
  modified_base 6: mod_base = OTHER; note = adenosine-3'-phosphate
  modified_base 7: mod_base = OTHER; note = guanosine-3'-phosphate
  modified_base 8: mod_base = OTHER; note = uridine-3'-phosphate
  modified_base 9: mod_base = OTHER; note = guanosine-3'-phosphate
  modified_base 10: mod_base = OTHER; note = guanosine-3'-phosphate
  modified_base 11: mod_base = OTHER; note = guanosine-3'-phosphate
  modified_base 12: mod_base = OTHER; note = adenosine-3'-phosphate
  modified_base 13: mod_base = OTHER; note = cytidine-3'-phosphate
  modified_base 14: mod_base = OTHER; note = adenosine-3'-phosphate
  modified_base 15: mod_base = OTHER; note = uridine-3'-phosphate
  modified_base 16: mod_base = OTHER; note = cytidine-3'-phosphate
  modified_base 17: mod_base = OTHER; note = adenosine-3'-phosphate
  modified_base 18: mod_base = OTHER; note = cytidine-3'-phosphate
  modified_base 19: mod_base = OTHER; note = adenosine-3'-phosphate
  misc_feature 1..19: note = RNA
  misc_feature 20..21: note = DNA
cacagagtgggacatcacatt

SEQ ID NO: 584 - DNA, 21 bp, synthetic construct
  source 1..21: mol_type = other DNA
  modified_base 1: mod_base = OTHER; note = uridine-3'-phosphate
  modified_base 2: mod_base = OTHER; note = guanosine-3'-phosphate
  modified_base 3: mod_base = OTHER; note = uridine-3'-phosphate
  modified_base 4: mod_base = OTHER; note = guanosine-3'-phosphate
  modified_base 5: mod_base = OTHER; note = adenosine-3'-phosphate
  modified_base 6: mod_base = OTHER; note = uridine-3'-phosphate
  modified_base 7: mod_base = OTHER; note = guanosine-3'-phosphate
  modified_base 8: mod_base = OTHER; note = uridine-3'-phosphate
  modified_base 9: mod_base = OTHER; note = cytidine-3'-phosphate
  modified_base 10: mod_base = OTHER; note = cytidine-3'-phosphate
  modified_base 11: mod_base = OTHER; note = cytidine-3'-phosphate
  modified_base 12: mod_base = OTHER; note = adenosine-3'-phosphate
  modified_base 13: mod_base = OTHER; note = cytidine-3'-phosphate
  modified_base 14: mod_base = OTHER; note = uridine-3'-phosphate
  modified_base 15: mod_base = OTHER; note = cytidine-3'-phosphate
  modified_base 16: mod_base = OTHER; note = uridine-3'-phosphate
  modified_base 17: mod_base = OTHER; note = guanosine-3'-phosphate
  modified_base 18: mod_base = OTHER; note = uridine-3'-phosphate
  modified_base 19: mod_base = OTHER; note = guanosine-3'-phosphate
  misc_feature 1..19: note = RNA
  misc_feature 20..21: note = DNA
tgtgatgtcccactctgtgtt

SEQ ID NO: 585 - DNA, 21 bp, synthetic construct
  source 1..21: mol_type = other DNA
  modified_base 1: mod_base = OTHER; note = adenosine-3'-phosphate
  modified_base 2: mod_base = OTHER; note = uridine-3'-phosphate
  modified_base 3: mod_base = OTHER; note = guanosine-3'-phosphate
  modified_base 4: mod_base = OTHER; note = cytidine-3'-phosphate
  modified_base 5: mod_base = OTHER; note = uridine-3'-phosphate
  modified_base 6: mod_base = OTHER; note = guanosine-3'-phosphate
  modified_base 7: mod_base = OTHER; note = uridine-3'-phosphate
  modified_base 8: mod_base = OTHER; note = cytidine-3'-phosphate
  modified_base 9: mod_base = OTHER; note = uridine-3'-phosphate
  modified_base 10: mod_base = OTHER; note = guanosine-3'-phosphate
  modified_base 11: mod_base = OTHER; note = cytidine-3'-phosphate
  modified_base 12: mod_base = OTHER; note = cytidine-3'-phosphate
  modified_base 13: mod_base = OTHER; note = guanosine-3'-phosphate
  modified_base 14: mod_base = OTHER; note = adenosine-3'-phosphate
  modified_base 15: mod_base = OTHER; note = guanosine-3'-phosphate
  modified_base 16: mod_base = OTHER; note = cytidine-3'-phosphate
  modified_base 17: mod_base = OTHER; note = cytidine-3'-phosphate
  modified_base 18: mod_base = OTHER; note = guanosine-3'-phosphate
  modified_base 19: mod_base = OTHER; note = guanosine-3'-phosphate
  modified_base 20: mod_base = OTHER; note = 2'-deoxythymidine-3'-phosphorothioate
  misc_feature 1..19: note = RNA
  misc_feature 20..21: note = DNA
atgctgtctgccgagccggtt

SEQ ID NO: 586 - DNA, 21 bp, synthetic construct
  source 1..21: mol_type = other DNA
  modified_base 1: mod_base = OTHER; note = cytidine-3'-phosphate
  modified_base 2: mod_base = OTHER; note = cytidine-3'-phosphate
  modified_base 3: mod_base = OTHER; note = guanosine-3'-phosphate
  modified_base 4: mod_base = OTHER; note = guanosine-3'-phosphate
  modified_base 5: mod_base = OTHER; note = cytidine-3'-phosphate
  modified_base 6: mod_base = OTHER; note = uridine-3'-phosphate
  modified_base 7: mod_base = OTHER; note = cytidine-3'-phosphate
  modified_base 8: mod_base = OTHER; note = guanosine-3'-phosphate
  modified_base 9: mod_base = OTHER; note = guanosine-3'-phosphate
  modified_base 10: mod_base = OTHER; note = cytidine-3'-phosphate
  modified_base 11: mod_base = OTHER; note = adenosine-3'-phosphate
  modified_base 12: mod_base = OTHER; note = guanosine-3'-phosphate
  modified_base 13: mod_base = OTHER; note = adenosine-3'-phosphate
  modified_base 14: mod_base = OTHER; note = cytidine-3'-phosphate
  modified_base 15: mod_base = OTHER; note = adenosine-3'-phosphate
  modified_base 16: mod_base = OTHER; note = guanosine-3'-phosphate
  modified_base 17: mod_base = OTHER; note = cytidine-3'-phosphate
  modified_base 18: mod_base = OTHER; note = adenosine-3'-phosphate
  modified_base 19: mod_base = OTHER; note = uridine-3'-phosphate
  modified_base 20: mod_base = OTHER; note = 2'-deoxythymidine-3'-phosphorothioate
  misc_feature 1..19: note = RNA
  misc_feature 20..21: note = DNA
ccggctcggcagacagcattt

SEQ ID NO: 587 - DNA, 21 bp, synthetic construct
  source 1..21: mol_type = other DNA
  modified_base 1: mod_base = OTHER; note = adenosine-3'-phosphate
  modified_base 2: mod_base = OTHER; note = 2'-O-methyluridine-3'-phosphate
  modified_base 3: mod_base = OTHER; note = guanosine-3'-phosphate
  modified_base 4: mod_base = OTHER; note = 2'-O-methylcytidine-3'-phosphate
  modified_base 5: mod_base = OTHER; note = 2'-O-methyluridine-3'-phosphate
  modified_base 6: mod_base = OTHER; note = guanosine-3'-phosphate
  modified_base 7: mod_base = OTHER; note = 2'-O-methyluridine-3'-phosphate
  modified_base 8: mod_base = OTHER; note = 2'-O-methylcytidine-3'-phosphate
  modified_base 9: mod_base = OTHER; note = 2'-O-methyluridine-3'-phosphate
  modified_base 10: mod_base = OTHER; note = guanosine-3'-phosphate
  modified_base 11: mod_base = OTHER; note = 2'-O-methylcytidine-3'-phosphate
  modified_base 12: mod_base = OTHER; note = 2'-O-methylcytidine-3'-phosphate
  modified_base 13: mod_base = OTHER; note = guanosine-3'-phosphate
  modified_base 14: mod_base = OTHER; note = adenosine-3'-phosphate
  modified_base 15: mod_base = OTHER; note = guanosine-3'-phosphate
  modified_base 16: mod_base = OTHER; note = 2'-O-methylcytidine-3'-phosphate
  modified_base 17: mod_base = OTHER; note = 2'-O-methylcytidine-3'-phosphate
  modified_base 18: mod_base = OTHER; note = guanosine-3'-phosphate
  modified_base 19: mod_base = OTHER; note = guanosine-3'-phosphate
  modified_base 20: mod_base = OTHER; note = 2'-deoxythymidine-3'-phosphorothioate
  misc_feature 1..19: note = RNA
  misc_feature 20..21: note = DNA
atgctgtctgccgagccggtt

SEQ ID NO: 588 - DNA, 21 bp, synthetic construct
  source 1..21: mol_type = other DNA
  modified_base 1: mod_base = OTHER; note = cytidine-3'-phosphate
  modified_base 2: mod_base = OTHER; note = cytidine-3'-phosphate
  modified_base 3: mod_base = OTHER; note = guanosine-3'-phosphate
  modified_base 4: mod_base = OTHER; note = guanosine-3'-phosphate
  modified_base 5: mod_base = OTHER; note = cytidine-3'-phosphate
  modified_base 6: mod_base = OTHER; note = uridine-3'-phosphate
  modified_base 7: mod_base = OTHER; note = cytidine-3'-phosphate
  modified_base 8: mod_base = OTHER; note = guanosine-3'-phosphate
  modified_base 9: mod_base = OTHER; note = guanosine-3'-phosphate
  modified_base 10: mod_base = OTHER; note = 2'-O-methylcytidine-3'-phosphate
  modified_base 11: mod_base = OTHER; note = adenosine-3'-phosphate
  modified_base 12: mod_base = OTHER; note = guanosine-3'-phosphate
  modified_base 13: mod_base = OTHER; note = adenosine-3'-phosphate
  modified_base 14: mod_base = OTHER; note = 2'-O-methylcytidine-3'-phosphate
  modified_base 15: mod_base = OTHER; note = adenosine-3'-phosphate
  modified_base 16: mod_base = OTHER; note = guanosine-3'-phosphate
  modified_base 17: mod_base = OTHER; note = 2'-O-methylcytidine-3'-phosphate
  modified_base 18: mod_base = OTHER; note = adenosine-3'-phosphate
  modified_base 19: mod_base = OTHER; note = uridine-3'-phosphate
  modified_base 20: mod_base = OTHER; note = 2'-deoxythymidine-3'-phosphorothioate
  misc_feature 1..19: note = RNA
  misc_feature 20..21: note = DNA
ccggctcggcagacagcattt

SEQ ID NO: 589 - DNA, 21 bp, synthetic construct
  source 1..21: mol_type = other DNA
  modified_base 1: mod_base = OTHER; note = guanosine-3'-phosphate
  modified_base 2: mod_base = OTHER; note = uridine-3'-phosphate
  modified_base 3: mod_base = OTHER; note = cytidine-3'-phosphate
  modified_base 4: mod_base = OTHER; note = uridine-3'-phosphate
  modified_base 5: mod_base = OTHER; note = guanosine-3'-phosphate
  modified_base 6: mod_base = OTHER; note = cytidine-3'-phosphate
  modified_base 7: mod_base = OTHER; note = cytidine-3'-phosphate
  modified_base 8: mod_base = OTHER; note = guanosine-3'-phosphate
  modified_base 9: mod_base = OTHER; note = adenosine-3'-phosphate
  modified_base 10: mod_base = OTHER; note = guanosine-3'-phosphate
  modified_base 11: mod_base = OTHER; note = cytidine-3'-phosphate
  modified_base 12: mod_base = OTHER; note = cytidine-3'-phosphate
  modified_base 13: mod_base = OTHER; note = guanosine-3'-phosphate
  modified_base 14: mod_base = OTHER; note = guanosine-3'-phosphate
  modified_base 15: mod_base = OTHER; note = adenosine-3'-phosphate
  modified_base 16: mod_base = OTHER; note = guanosine-3'-phosphate
  modified_base 17: mod_base = OTHER; note = cytidine-3'-phosphate
  modified_base 18: mod_base = OTHER; note = uridine-3'-phosphate
  modified_base 19: mod_base = OTHER; note = cytidine-3'-phosphate
  modified_base 20: mod_base = OTHER; note = 2'-deoxythymidine-3'-phosphorothioate
  misc_feature 1..19: note = RNA
  misc_feature 20..21: note = DNA
gtctgccgagccggagctctt

SEQ ID NO: 590 - DNA, 21 bp, synthetic construct
  source 1..21: mol_type = other DNA
  modified_base 1: mod_base = OTHER; note = guanosine-3'-phosphate
  modified_base 2: mod_base = OTHER; note = adenosine-3'-phosphate
  modified_base 3: mod_base = OTHER; note = guanosine-3'-phosphate
  modified_base 4: mod_base = OTHER; note = cytidine-3'-phosphate
  modified_base 5: mod_base = OTHER; note = uridine-3'-phosphate
  modified_base 6: mod_base = OTHER; note = cytidine-3'-phosphate
  modified_base 7: mod_base = OTHER; note = cytidine-3'-phosphate
  modified_base 8: mod_base = OTHER; note = guanosine-3'-phosphate
  modified_base 9: mod_base = OTHER; note = guanosine-3'-phosphate
  modified_base 10: mod_base = OTHER; note = cytidine-3'-phosphate
  modified_base 11: mod_base = OTHER; note = uridine-3'-phosphate
  modified_base 12: mod_base = OTHER; note = cytidine-3'-phosphate
  modified_base 13: mod_base = OTHER; note = guanosine-3'-phosphate
  modified_base 14: mod_base = OTHER; note = guanosine-3'-phosphate
  modified_base 15: mod_base = OTHER; note = cytidine-3'-phosphate
  modified_base 16: mod_base = OTHER; note = adenosine-3'-phosphate
  modified_base 17: mod_base = OTHER; note = guanosine-3'-phosphate
  modified_base 18: mod_base = OTHER; note = adenosine-3'-phosphate
  modified_base 19: mod_base = OTHER; note = cytidine-3'-phosphate
  modified_base 20: mod_base = OTHER; note = 2'-deoxythymidine-3'-phosphorothioate
  misc_feature 1..19: note = RNA
  misc_feature 20..21: note = DNA
gagctccggctcggcagactt

SEQ ID NO: 591 - DNA, 21 bp, synthetic construct
  source 1..21: mol_type = other DNA
  modified_base 1: mod_base = OTHER; note = guanosine-3'-phosphate
  modified_base 2: mod_base = OTHER; note = 2'-O-methyluridine-3'-phosphate
  modified_base 3: mod_base = OTHER; note = 2'-O-methylcytidine-3'-phosphate
  modified_base 4: mod_base = OTHER; note = 2'-O-methyluridine-3'-phosphate
  modified_base 5: mod_base = OTHER; note = guanosine-3'-phosphate
  modified_base 6: mod_base = OTHER; note = 2'-O-methylcytidine-3'-phosphate
  modified_base 7: mod_base = OTHER; note = 2'-O-methylcytidine-3'-phosphate
  modified_base 8: mod_base = OTHER; note = guanosine-3'-phosphate
  modified_base 9: mod_base = OTHER; note = adenosine-3'-phosphate
  modified_base 10: mod_base = OTHER; note = guanosine-3'-phosphate
  modified_base 11: mod_base = OTHER; note = 2'-O-methylcytidine-3'-phosphate
  modified_base 12: mod_base = OTHER; note = 2'-O-methylcytidine-3'-phosphate
  modified_base 13: mod_base = OTHER; note = guanosine-3'-phosphate
  modified_base 14: mod_base = OTHER; note = guanosine-3'-phosphate
  modified_base 15: mod_base = OTHER; note = adenosine-3'-phosphate
  modified_base 16: mod_base = OTHER; note = guanosine-3'-phosphate
  modified_base 17: mod_base = OTHER; note = 2'-O-methylcytidine-3'-phosphate
  modified_base 18: mod_base = OTHER; note = 2'-O-methyluridine-3'-phosphate
  modified_base 19: mod_base = OTHER; note = 2'-O-methylcytidine-3'-phosphate
  modified_base 20: mod_base = OTHER; note = 2'-deoxythymidine-3'-phosphorothioate
  misc_feature 1..19: note = RNA
  misc_feature 20..21: note = DNA
gtctgccgagccggagctctt

SEQ ID NO: 592 - DNA, 21 bp, synthetic construct
  source 1..21: mol_type = other DNA
  modified_base 1: mod_base = OTHER; note = guanosine-3'-phosphate
  modified_base 2: mod_base = OTHER; note = adenosine-3'-phosphate
  modified_base 3: mod_base = OTHER; note = guanosine-3'-phosphate
  modified_base 4: mod_base = OTHER; note = cytidine-3'-phosphate
  modified_base 5: mod_base = OTHER; note = uridine-3'-phosphate
  modified_base 6: mod_base = OTHER; note = cytidine-3'-phosphate
  modified_base 7: mod_base = OTHER; note = cytidine-3'-phosphate
  modified_base 8: mod_base = OTHER; note = guanosine-3'-phosphate
  modified_base 9: mod_base = OTHER; note = guanosine-3'-phosphate
  modified_base 10: mod_base = OTHER; note = cytidine-3'-phosphate
  modified_base 11: mod_base = OTHER; note = uridine-3'-phosphate
  modified_base 12: mod_base = OTHER; note = cytidine-3'-phosphate
  modified_base 13: mod_base = OTHER; note = guanosine-3'-phosphate
  modified_base 14: mod_base = OTHER; note = guanosine-3'-phosphate
  modified_base 15: mod_base = OTHER; note = 2'-O-methylcytidine-3'-phosphate
  modified_base 16: mod_base = OTHER; note = adenosine-3'-phosphate
  modified_base 17: mod_base = OTHER; note = guanosine-3'-phosphate
  modified_base 18: mod_base = OTHER; note = adenosine-3'-phosphate
  modified_base 19: mod_base = OTHER; note = cytidine-3'-phosphate
  modified_base 20: mod_base = OTHER; note = 2'-deoxythymidine-3'-phosphorothioate
  misc_feature 1..19: note = RNA
  misc_feature 20..21: note = DNA
gagctccggctcggcagactt

SEQ ID NO: 593 - DNA, 21 bp, synthetic construct
  source 1..21: mol_type = other DNA
  modified_base 1: mod_base = OTHER; note = guanosine-3'-phosphate
  modified_base 2: mod_base = OTHER; note = uridine-3'-phosphate
  modified_base 3: mod_base = OTHER; note = uridine-3'-phosphate
  modified_base 4: mod_base = OTHER; note = guanosine-3'-phosphate
  modified_base 5: mod_base = OTHER; note = adenosine-3'-phosphate
  modified_base 6: mod_base = OTHER; note = guanosine-3'-phosphate
  modified_base 7: mod_base = OTHER; note = guanosine-3'-phosphate
  modified_base 8: mod_base = OTHER; note = cytidine-3'-phosphate
  modified_base 9: mod_base = OTHER; note = adenosine-3'-phosphate
  modified_base 10: mod_base = OTHER; note = guanosine-3'-phosphate
  modified_base 11: mod_base = OTHER; note = adenosine-3'-phosphate
  modified_base 12: mod_base = OTHER; note = guanosine-3'-phosphate
  modified_base 13: mod_base = OTHER; note = adenosine-3'-phosphate
  modified_base 14: mod_base = OTHER; note = cytidine-3'-phosphate
  modified_base 15: mod_base = OTHER; note = uridine-3'-phosphate
  modified_base 16: mod_base = OTHER; note = guanosine-3'-phosphate
  modified_base 17: mod_base = OTHER; note = adenosine-3'-phosphate
  modified_base 18: mod_base = OTHER; note = uridine-3'-phosphate
  modified_base 19: mod_base = OTHER; note = cytidine-3'-phosphate
  modified_base 20: mod_base = OTHER; note = 2'-deoxythymidine-3'-phosphorothioate
  misc_feature 1..19: note = RNA
  misc_feature 20..21: note = DNA
gttgaggcagagactgatctt

SEQ ID NO: 594 - DNA, 21 bp, synthetic construct
  source 1..21: mol_type = other DNA
  modified_base 1: mod_base = OTHER; note = guanosine-3'-phosphate
  modified_base 2: mod_base = OTHER; note = adenosine-3'-phosphate
  modified_base 3: mod_base = OTHER; note = uridine-3'-phosphate
  modified_base 4: mod_base = OTHER; note = cytidine-3'-phosphate
  modified_base 5: mod_base = OTHER; note = adenosine-3'-phosphate
  modified_base 6: mod_base = OTHER; note = guanosine-3'-phosphate
  modified_base 7: mod_base = OTHER; note = uridine-3'-phosphate
  modified_base 8: mod_base = OTHER; note = cytidine-3'-phosphate
  modified_base 9: mod_base = OTHER; note = uridine-3'-phosphate
  modified_base 10: mod_base = OTHER; note = cytidine-3'-phosphate
  modified_base 11: mod_base = OTHER; note = uridine-3'-phosphate
  modified_base 12: mod_base = OTHER; note = guanosine-3'-phosphate
  modified_base 13: mod_base = OTHER; note = cytidine-3'-phosphate
  modified_base 14: mod_base = OTHER; note = cytidine-3'-phosphate
  modified_base 15: mod_base = OTHER; note = uridine-3'-phosphate
  modified_base 16: mod_base = OTHER; note = cytidine-3'-phosphate
  modified_base 17: mod_base = OTHER; note = adenosine-3'-phosphate
  modified_base 18: mod_base = OTHER; note = adenosine-3'-phosphate
  modified_base 19: mod_base = OTHER; note = cytidine-3'-phosphate
  modified_base 20: mod_base = OTHER; note = 2'-deoxythymidine-3'-phosphorothioate
  misc_feature 1..19: note = RNA
  misc_feature 20..21: note = DNA
gatcagtctctgcctcaactt

SEQ ID NO: 595 - DNA, 21 bp, synthetic construct
  source 1..21: mol_type = other DNA
  modified_base 1: mod_base = OTHER; note = guanosine-3'-phosphate
  modified_base 2: mod_base = OTHER; note = 2'-O-methyluridine-3'-phosphate
  modified_base 3: mod_base = OTHER; note = 2'-O-methyluridine-3'-phosphate
  modified_base 4: mod_base = OTHER; note = guanosine-3'-phosphate
  modified_base 5: mod_base = OTHER; note = adenosine-3'-phosphate
  modified_base 6: mod_base = OTHER; note = guanosine-3'-phosphate
  modified_base 7: mod_base = OTHER; note = guanosine-3'-phosphate
  modified_base 8: mod_base = OTHER; note = 2'-O-methylcytidine-3'-phosphate
  modified_base 9: mod_base = OTHER; note = adenosine-3'-phosphate
  modified_base 10: mod_base = OTHER; note = guanosine-3'-phosphate
  modified_base 11: mod_base = OTHER; note = adenosine-3'-phosphate
  modified_base 12: mod_base = OTHER; note = guanosine-3'-phosphate
  modified_base 13: mod_base = OTHER; note = adenosine-3'-phosphate
  modified_base 14: mod_base = OTHER; note = 2'-O-methylcytidine-3'-phosphate
  modified_base 15: mod_base = OTHER; note = 2'-O-methyluridine-3'-phosphate
  modified_base 16: mod_base = OTHER; note = guanosine-3'-phosphate
  modified_base 17: mod_base = OTHER; note = adenosine-3'-phosphate
  modified_base 18: mod_base = OTHER; note = 2'-O-methyluridine-3'-phosphate
  modified_base 19: mod_base = OTHER; note = 2'-O-methylcytidine-3'-phosphate
  modified_base 20: mod_base = OTHER; note = 2'-deoxythymidine-3'-phosphorothioate
  misc_feature 1..19: note = RNA
  misc_feature 20..21: note = DNA
gttgaggcagagactgatctt

SEQ ID NO: 596 - DNA, 21 bp, synthetic construct
  source 1..21: mol_type = other DNA
  modified_base 1: mod_base = OTHER; note = guanosine-3'-phosphate
  modified_base 2: mod_base = OTHER; note = adenosine-3'-phosphate
  modified_base 3: mod_base = OTHER; note = uridine-3'-phosphate
  modified_base 4: mod_base = OTHER; note = 2'-O-methylcytidine-3'-phosphate
  modified_base 5: mod_base = OTHER; note = adenosine-3'-phosphate
  modified_base 6: mod_base = OTHER; note = guanosine-3'-phosphate
  modified_base 7: mod_base = OTHER; note = uridine-3'-phosphate
  modified_base 8: mod_base = OTHER; note = cytidine-3'-phosphate
  modified_base 9: mod_base = OTHER; note = uridine-3'-phosphate
  modified_base 10: mod_base = OTHER; note = cytidine-3'-phosphate
  modified_base 11: mod_base = OTHER; note = uridine-3'-phosphate
  modified_base 12: mod_base = OTHER; note = guanosine-3'-phosphate
  modified_base 13: mod_base = OTHER; note = cytidine-3'-phosphate
  modified_base 14: mod_base = OTHER; note = cytidine-3'-phosphate
  modified_base 15: mod_base = OTHER; note = uridine-3'-phosphate
  modified_base 16: mod_base = OTHER; note = 2'-O-methylcytidine-3'-phosphate
  modified_base 17: mod_base = OTHER; note = adenosine-3'-phosphate
  modified_base 18: mod_base = OTHER; note = adenosine-3'-phosphate
  modified_base 19: mod_base = OTHER; note = cytidine-3'-phosphate
  modified_base 20: mod_base = OTHER; note = 2'-deoxythymidine-3'-phosphorothioate
  misc_feature 1..19: note = RNA
  misc_feature 20..21: note = DNA
gatcagtctctgcctcaactt

SEQ ID NO: 597 - DNA, 21 bp, synthetic construct
  source 1..21: mol_type = other DNA
  modified_base 1: mod_base = OTHER; note = guanosine-3'-phosphate
  modified_base 2: mod_base = OTHER; note = cytidine-3'-phosphate
  modified_base 3: mod_base = OTHER; note = adenosine-3'-phosphate
  modified_base 4: mod_base = OTHER; note = guanosine-3'-phosphate
  modified_base 5: mod_base = OTHER; note = adenosine-3'-phosphate
  modified_base 6: mod_base = OTHER; note = guanosine-3'-phosphate
  modified_base 7: mod_base = OTHER; note = adenosine-3'-phosphate
  modified_base 8: mod_base = OTHER; note = cytidine-3'-phosphate
  modified_base 9: mod_base = OTHER; note = uridine-3'-phosphate
  modified_base 10: mod_base = OTHER; note = guanosine-3'-phosphate
  modified_base 11: mod_base = OTHER; note = adenosine-3'-phosphate
  modified_base 12: mod_base = OTHER; note = uridine-3'-phosphate
  modified_base 13: mod_base = OTHER; note = cytidine-3'-phosphate
  modified_base 14: mod_base = OTHER; note = cytidine-3'-phosphate
  modified_base 15: mod_base = OTHER; note = adenosine-3'-phosphate
  modified_base 16: mod_base = OTHER; note = cytidine-3'-phosphate
  modified_base 17: mod_base = OTHER; note = uridine-3'-phosphate
  modified_base 18: mod_base = OTHER; note = uridine-3'-phosphate
  modified_base 19: mod_base = OTHER; note = cytidine-3'-phosphate
  modified_base 20: mod_base = OTHER; note = 2'-deoxythymidine-3'-phosphorothioate
  misc_feature 1..19: note = RNA
  misc_feature 20..21: note = DNA
gcagagactgatccacttctt

SEQ ID NO: 598 - DNA, 21 bp, synthetic construct
  source 1..21: mol_type = other DNA
  modified_base 1: mod_base = OTHER; note = guanosine-3'-phosphate
  modified_base 2: mod_base = OTHER; note = adenosine-3'-phosphate
  modified_base 3: mod_base = OTHER; note = adenosine-3'-phosphate
  modified_base 4: mod_base = OTHER; note = guanosine-3'-phosphate
  modified_base 5: mod_base = OTHER; note = uridine-3'-phosphate
  modified_base 6: mod_base = OTHER; note = guanosine-3'-phosphate
  modified_base 7: mod_base = OTHER; note = guanosine-3'-phosphate
  modified_base 8: mod_base = OTHER; note = adenosine-3'-phosphate
  modified_base 9: mod_base = OTHER; note = uridine-3'-phosphate
  modified_base 10: mod_base = OTHER; note = cytidine-3'-phosphate
  modified_base 11: mod_base = OTHER; note = adenosine-3'-phosphate
  modified_base 12: mod_base = OTHER; note = guanosine-3'-phosphate
  modified_base 13: mod_base = OTHER; note = uridine-3'-phosphate
  modified_base 14: mod_base = OTHER; note = cytidine-3'-phosphate
  modified_base 15: mod_base = OTHER; note = uridine-3'-phosphate
  modified_base 16: mod_base = OTHER; note = cytidine-3'-phosphate
  modified_base 17: mod_base = OTHER; note = uridine-3'-phosphate
  modified_base 18: mod_base = OTHER; note = guanosine-3'-phosphate
  modified_base 19: mod_base = OTHER; note = cytidine-3'-phosphate
  modified_base 20: mod_base = OTHER; note = 2'-deoxythymidine-3'-phosphorothioate
  misc_feature 1..19: note = RNA
  misc_feature 20..21: note = DNA
gaagtggatcagtctctgctt

SEQ ID NO: 599 - DNA, 21 bp, synthetic construct
  source 1..21: mol_type = other DNA
  modified_base 1: mod_base = OTHER; note = guanosine-3'-phosphate
  modified_base 2: mod_base = OTHER; note = 2'-O-methylcytidine-3'-phosphate
  modified_base 3: mod_base = OTHER; note = adenosine-3'-phosphate
  modified_base 4: mod_base = OTHER; note = guanosine-3'-phosphate
  modified_base 5: mod_base = OTHER; note = adenosine-3'-phosphate
  modified_base 6: mod_base = OTHER; note = guanosine-3'-phosphate
  modified_base 7: mod_base = OTHER; note = adenosine-3'-phosphate
  modified_base 8: mod_base = OTHER; note = 2'-O-methylcytidine-3'-phosphate
  modified_base 9: mod_base = OTHER; note = 2'-O-methyluridine-3'-phosphate
  modified_base 10: mod_base = OTHER; note = guanosine-3'-phosphate
  modified_base 11: mod_base = OTHER; note = adenosine-3'-phosphate
  modified_base 12: mod_base = OTHER; note = 2'-O-methyluridine-3'-phosphate
  modified_base 13: mod_base = OTHER; note = 2'-O-methylcytidine-3'-phosphate
  modified_base 14: mod_base = OTHER; note = 2'-O-methylcytidine-3'-phosphate
  modified_base 15: mod_base = OTHER; note = adenosine-3'-phosphate
  modified_base 16: mod_base = OTHER; note = 2'-O-methylcytidine-3'-phosphate
  modified_base 17: mod_base = OTHER; note = 2'-O-methyluridine-3'-phosphate
  modified_base 18: mod_base = OTHER; note = 2'-O-methyluridine-3'-phosphate
  modified_base 19: mod_base = OTHER; note = 2'-O-methylcytidine-3'-phosphate
  modified_base 20: mod_base = OTHER; note = 2'-deoxythymidine-3'-phosphorothioate
  misc_feature 1..19: note = RNA
  misc_feature 20..21: note = DNA
gcagagactgatccacttctt

SEQ ID NO: 600 - DNA, 21 bp, synthetic construct
  source 1..21: mol_type = other DNA
  modified_base 1: mod_base = OTHER; note = guanosine-3'-phosphate
  modified_base 2: mod_base = OTHER; note = adenosine-3'-phosphate
  modified_base 3: mod_base = OTHER; note = adenosine-3'-phosphate
  modified_base 4: mod_base = OTHER; note = guanosine-3'-phosphate
  modified_base 5: mod_base = OTHER; note = uridine-3'-phosphate
  modified_base 6: mod_base = OTHER; note = guanosine-3'-phosphate
  modified_base 7: mod_base = OTHER; note = guanosine-3'-phosphate
  modified_base 8: mod_base = OTHER; note = adenosine-3'-phosphate
  modified_base 9: mod_base = OTHER; note = uridine-3'-phosphate
  modified_base 10: mod_base = OTHER; note = 2'-O-methylcytidine-3'-phosphate
  modified_base 11: mod_base = OTHER; note = adenosine-3'-phosphate
  modified_base 12: mod_base = OTHER; note = guanosine-3'-phosphate
  modified_base 13: mod_base = OTHER; note = uridine-3'-phosphate
  modified_base 14: mod_base = OTHER; note = cytidine-3'-phosphate
  modified_base 15: mod_base = OTHER; note = uridine-3'-phosphate
  modified_base 16: mod_base = OTHER; note = cytidine-3'-phosphate
  modified_base 17: mod_base = OTHER; note = uridine-3'-phosphate
  modified_base 18: mod_base = OTHER; note = guanosine-3'-phosphate
  modified_base 19: mod_base = OTHER; note = cytidine-3'-phosphate
  modified_base 20: mod_base = OTHER; note = 2'-deoxythymidine-3'-phosphorothioate
  misc_feature 1..19: note = RNA
  misc_feature 20..21: note = DNA
gaagtggatcagtctctgctt

SEQ ID NO: 601 - DNA, 21 bp, synthetic construct
  source 1..21: mol_type = other DNA
  modified_base 1: mod_base = OTHER; note = adenosine-3'-phosphate
  modified_base 2: mod_base = OTHER; note = guanosine-3'-phosphate
  modified_base 3: mod_base = OTHER; note = adenosine-3'-phosphate
  modified_base 4: mod_base = OTHER; note = guanosine-3'-phosphate
  modified_base 5: mod_base = OTHER; note = adenosine-3'-phosphate
  modified_base 6: mod_base = OTHER; note = cytidine-3'-phosphate
  modified_base 7: mod_base = OTHER; note = uridine-3'-phosphate
  modified_base 8: mod_base = OTHER; note = guanosine-3'-phosphate
  modified_base 9: mod_base = OTHER; note = adenosine-3'-phosphate
  modified_base 10: mod_base = OTHER; note = uridine-3'-phosphate
  modified_base 11: mod_base = OTHER; note = cytidine-3'-phosphate
  modified_base 12: mod_base = OTHER; note = cytidine-3'-phosphate
  modified_base 13: mod_base = OTHER; note = adenosine-3'-phosphate
  modified_base 14: mod_base = OTHER; note = cytidine-3'-phosphate
  modified_base 15: mod_base = OTHER; note = uridine-3'-phosphate
  modified_base 16: mod_base = OTHER; note = uridine-3'-phosphate
  modified_base 17: mod_base = OTHER; note = cytidine-3'-phosphate
  modified_base 18: mod_base = OTHER; note = uridine-3'-phosphate
  modified_base 19: mod_base = OTHER; note = cytidine-3'-phosphate
  modified_base 20: mod_base = OTHER; note = 2'-deoxythymidine-3'-phosphorothioate
  misc_feature 1..19: note = RNA
  misc_feature 20..21: note = DNA
agagactgatccacttctctt

SEQ ID NO: 602 - DNA, 21 bp, synthetic construct
  source 1..21: mol_type = other DNA
  modified_base 1: mod_base = OTHER; note = guanosine-3'-phosphate
  modified_base 2: mod_base = OTHER; note = adenosine-3'-phosphate
  modified_base 3: mod_base = OTHER; note = guanosine-3'-phosphate
  modified_base 4: mod_base = OTHER; note = adenosine-3'-phosphate
  modified_base 5: mod_base = OTHER; note = adenosine-3'-phosphate
  modified_base 6: mod_base = OTHER; note = guanosine-3'-phosphate
  modified_base 7: mod_base = OTHER; note = uridine-3'-phosphate
  modified_base 8: mod_base = OTHER; note = guanosine-3'-phosphate
  modified_base 9: mod_base = OTHER; note = guanosine-3'-phosphate
  modified_base 10: mod_base = OTHER; note = adenosine-3'-phosphate
  modified_base 11: mod_base = OTHER; note = uridine-3'-phosphate
  modified_base 12: mod_base = OTHER; note = cytidine-3'-phosphate
  modified_base 13: mod_base = OTHER; note = adenosine-3'-phosphate
  modified_base 14: mod_base = OTHER; note = guanosine-3'-phosphate
  modified_base 15: mod_base = OTHER; note = uridine-3'-phosphate
  modified_base 16: mod_base = OTHER; note = cytidine-3'-phosphate
  modified_base 17: mod_base = OTHER; note = uridine-3'-phosphate
  modified_base 18: mod_base = OTHER; note = cytidine-3'-phosphate
  modified_base 19: mod_base = OTHER; note = uridine-3'-phosphate
  modified_base 20: mod_base = OTHER; note = 2'-deoxythymidine-3'-phosphorothioate
  misc_feature 1..19: note = RNA
  misc_feature 20..21: note = DNA
gagaagtggatcagtctcttt

SEQ ID NO: 603 - DNA, 21 bp, synthetic construct
  source 1..21: mol_type = other DNA
  modified_base 1: mod_base = OTHER; note = adenosine-3'-phosphate
  modified_base 2: mod_base = OTHER; note = guanosine-3'-phosphate
  modified_base 3: mod_base = OTHER; note = adenosine-3'-phosphate
  modified_base 4: mod_base = OTHER; note = guanosine-3'-phosphate
  modified_base 5: mod_base = OTHER; note = adenosine-3'-phosphate
  modified_base 6: mod_base = OTHER; note = 2'-O-methylcytidine-3'-phosphate
  modified_base 7: mod_base = OTHER; note = 2'-O-methyluridine-3'-phosphate
  modified_base 8: mod_base = OTHER; note = guanosine-3'-phosphate
  modified_base 9: mod_base = OTHER; note = adenosine-3'-phosphate
  modified_base 10: mod_base = OTHER; note = 2'-O-methyluridine-3'-phosphate
  modified_base 11: mod_base = OTHER; note = 2'-O-methylcytidine-3'-phosphate
  modified_base 12: mod_base = OTHER; note = 2'-O-methylcytidine-3'-phosphate
  modified_base 13: mod_base = OTHER; note = adenosine-3'-phosphate
  modified_base 14: mod_base = OTHER; note = 2'-O-methylcytidine-3'-phosphate
  modified_base 15: mod_base = OTHER; note = 2'-O-methyluridine-3'-phosphate
  modified_base 16: mod_base = OTHER; note = 2'-O-methyluridine-3'-phosphate
  modified_base 17: mod_base = OTHER; note = 2'-O-methylcytidine-3'-phosphate
  modified_base 18: mod_base = OTHER; note = 2'-O-methyluridine-3'-phosphate
  modified_base 19: mod_base = OTHER; note = 2'-O-methylcytidine-3'-phosphate
  modified_base 20: mod_base = OTHER; note = 2'-deoxythymidine-3'-phosphorothioate
  misc_feature 1..19: note = RNA
  misc_feature 20..21: note = DNA
agagactgatccacttctctt

SEQ ID NO: 604 - DNA, 21 bp, synthetic construct
  source 1..21: mol_type = other DNA
  modified_base 1: mod_base = OTHER; note = guanosine-3'-phosphate
  modified_base 2: mod_base = OTHER; note = adenosine-3'-phosphate
  modified_base 3: mod_base = OTHER; note = guanosine-3'-phosphate
  modified_base 4: mod_base = OTHER; note = adenosine-3'-phosphate
  modified_base 5: mod_base = OTHER; note = adenosine-3'-phosphate
  modified_base 6: mod_base = OTHER; note = guanosine-3'-phosphate
  modified_base 7: mod_base = OTHER; note = uridine-3'-phosphate
  modified_base 8: mod_base = OTHER; note = guanosine-3'-phosphate
  modified_base 9: mod_base = OTHER; note = guanosine-3'-phosphate
  modified_base 10: mod_base = OTHER; note = adenosine-3'-phosphate
  modified_base 11: mod_base = OTHER; note = uridine-3'-phosphate
  modified_base 12: mod_base = OTHER; note = 2'-O-methylcytidine-3'-phosphate
  modified_base 13: mod_base = OTHER; note = adenosine-3'-phosphate
  modified_base 14: mod_base = OTHER; note = guanosine-3'-phosphate
  modified_base 15: mod_base = OTHER; note = uridine-3'-phosphate
  modified_base 16: mod_base = OTHER; note = cytidine-3'-phosphate
  modified_base 17: mod_base = OTHER; note = uridine-3'-phosphate
  modified_base 18: mod_base = OTHER; note = cytidine-3'-phosphate
  modified_base 19: mod_base = OTHER; note = uridine-3'-phosphate
  modified_base 20: mod_base = OTHER; note = 2'-deoxythymidine-3'-phosphorothioate
  misc_feature 1..19: note = RNA
  misc_feature 20..21: note = DNA
gagaagtggatcagtctcttt

SEQ ID NO: 605 - DNA, 21 bp, synthetic construct
  source 1..21: mol_type = other DNA
  modified_base 1: mod_base = OTHER; note = uridine-3'-phosphate
  modified_base 2: mod_base = OTHER; note = uridine-3'-phosphate
  modified_base 3: mod_base = OTHER; note = cytidine-3'-phosphate
  modified_base 4: mod_base = OTHER; note = uridine-3'-phosphate
  modified_base 5: mod_base = OTHER; note = cytidine-3'-phosphate
  modified_base 6: mod_base = OTHER; note = uridine-3'-phosphate
  modified_base 7: mod_base = OTHER; note = guanosine-3'-phosphate
  modified_base 8: mod_base = OTHER; note = cytidine-3'-phosphate
  modified_base 9: mod_base = OTHER; note = cytidine-3'-phosphate
  modified_base 10: mod_base = OTHER; note = adenosine-3'-phosphate
  modified_base 11: mod_base = OTHER; note = adenosine-3'-phosphate
  modified_base 12: mod_base = OTHER; note = adenosine-3'-phosphate
  modified_base 13: mod_base = OTHER; note = guanosine-3'-phosphate
  modified_base 14: mod_base = OTHER; note = adenosine-3'-phosphate
  modified_base 15: mod_base = OTHER; note = uridine-3'-phosphate
  modified_base 16: mod_base = OTHER; note = guanosine-3'-phosphate
  modified_base 17: mod_base = OTHER; note = uridine-3'-phosphate
  modified_base 18: mod_base = OTHER; note = cytidine-3'-phosphate
  modified_base 19: mod_base = OTHER; note = adenosine-3'-phosphate
  modified_base 20: mod_base = OTHER; note = 2'-deoxythymidine-3'-phosphorothioate
  misc_feature 1..19: note = RNA
  misc_feature 20..21: note = DNA
ttctctgccaaagatgtcatt

SEQ ID NO: 606 - DNA, 21 bp, synthetic construct
  source 1..21: mol_type = other DNA
  modified_base 1: mod_base = OTHER; note = uridine-3'-phosphate
  modified_base 2: mod_base = OTHER; note = guanosine-3'-phosphate
  modified_base 3: mod_base = OTHER; note = adenosine-3'-phosphate
  modified_base 4: mod_base = OTHER; note = cytidine-3'-phosphate
  modified_base 5: mod_base = OTHER; note = adenosine-3'-phosphate
  modified_base 6: mod_base = OTHER; note = uridine-3'-phosphate
  modified_base 7: mod_base = OTHER; note = cytidine-3'-phosphate
  modified_base 8: mod_base = OTHER; note = uridine-3'-phosphate
  modified_base 9: mod_base = OTHER; note = uridine-3'-phosphate
  modified_base 10: mod_base = OTHER; note = uridine-3'-phosphate
  modified_base 11: mod_base = OTHER; note = guanosine-3'-phosphate
  modified_base 12: mod_base = OTHER; note = guanosine-3'-phosphate
  modified_base 13: mod_base = OTHER; note = cytidine-3'-phosphate
  modified_base 14: mod_base = OTHER; note = adenosine-3'-phosphate
  modified_base 15: mod_base = OTHER; note = guanosine-3'-phosphate
  modified_base 16: mod_base = OTHER; note = adenosine-3'-phosphate
  modified_base 17: mod_base = OTHER; note = guanosine-3'-phosphate
  modified_base 18: mod_base = OTHER; note = adenosine-3'-phosphate
  modified_base 19: mod_base = OTHER; note = adenosine-3'-phosphate
  modified_base 20: mod_base = OTHER; note = 2'-deoxythymidine-3'-phosphorothioate
  misc_feature 1..19: note = RNA
  misc_feature 20..21: note = DNA
tgacatctttggcagagaatt

SEQ ID NO: 607 - DNA, 21 bp, synthetic construct
  source 1..21: mol_type = other DNA
  modified_base 1: mod_base = OTHER; note = 2'-O-methyluridine-3'-phosphate
  modified_base 2: mod_base = OTHER; note = 2'-O-methyluridine-3'-phosphate
  modified_base 3: mod_base = OTHER; note = 2'-O-methylcytidine-3'-phosphate
  modified_base 4: mod_base = OTHER; note = 2'-O-methyluridine-3'-phosphate
  modified_base 5: mod_base = OTHER; note = 2'-O-methylcytidine-3'-phosphate
  modified_base 6: mod_base = OTHER; note = 2'-O-methyluridine-3'-phosphate
  modified_base 7: mod_base = OTHER; note = guanosine-3'-phosphate
  modified_base 8: mod_base = OTHER; note = 2'-O-methylcytidine-3'-phosphate
  modified_base 9: mod_base = OTHER; note = 2'-O-methylcytidine-3'-phosphate
  modified_base 10: mod_base = OTHER; note = adenosine-3'-phosphate
  modified_base 11: mod_base = OTHER; note = adenosine-3'-phosphate
  modified_base 12: mod_base = OTHER; note = adenosine-3'-phosphate
  modified_base 13: mod_base = OTHER; note = guanosine-3'-phosphate
  modified_base 14: mod_base = OTHER; note = adenosine-3'-phosphate
  modified_base 15: mod_base = OTHER; note = 2'-O-methyluridine-3'-phosphate
  modified_base 16: mod_base = OTHER; note = guanosine-3'-phosphate
  modified_base 17: mod_base = OTHER; note = 2'-O-methyluridine-3'-phosphate
  modified_base 18: mod_base = OTHER; note = 2'-O-methylcytidine-3'-phosphate
  modified_base 19: mod_base = OTHER; note = adenosine-3'-phosphate
  modified_base 20: mod_base = OTHER; note = 2'-deoxythymidine-3'-phosphorothioate
  misc_feature 1..19: note = RNA
  misc_feature 20..21: note = DNA
ttctctgccaaagatgtcatt

SEQ ID NO: 608 - DNA, 21 bp, synthetic construct
  source 1..21: mol_type = other DNA
  modified_base 1: mod_base = OTHER; note = uridine-3'-phosphate
  modified_base 2: mod_base = OTHER; note = guanosine-3'-phosphate
  modified_base 3: mod_base = OTHER; note = adenosine-3'-phosphate
  modified_base 4: mod_base = OTHER; note = 2'-O-methylcytidine-3'-phosphate
  modified_base 5: mod_base = OTHER; note = adenosine-3'-phosphate
  modified_base 6: mod_base = OTHER; note = uridine-3'-phosphate
  modified_base 7: mod_base = OTHER; note = cytidine-3'-phosphate
  modified_base 8: mod_base = OTHER; note = uridine-3'-phosphate
  modified_base 9: mod_base = OTHER; note = uridine-3'-phosphate
  modified_base 10: mod_base = OTHER; note = uridine-3'-phosphate
  modified_base 11: mod_base = OTHER; note = guanosine-3'-phosphate
  modified_base 12: mod_base = OTHER; note = guanosine-3'-phosphate
  modified_base 13: mod_base = OTHER; note = 2'-O-methylcytidine-3'-phosphate
  modified_base 14: mod_base = OTHER; note = adenosine-3'-phosphate
  modified_base 15: mod_base = OTHER; note = guanosine-3'-phosphate
  modified_base 16: mod_base = OTHER; note = adenosine-3'-phosphate
  modified_base 17: mod_base = OTHER; note = guanosine-3'-phosphate
  modified_base 18: mod_base = OTHER; note = adenosine-3'-phosphate
  modified_base 19: mod_base = OTHER; note = adenosine-3'-phosphate
  modified_base 20: mod_base = OTHER; note = 2'-deoxythymidine-3'-phosphorothioate
  misc_feature 1..19: note = RNA
  misc_feature 20..21: note = DNA
tgacatctttggcagagaatt

SEQ ID NO: 609 - DNA, 21 bp, synthetic construct
  source 1..21: mol_type = other DNA
  modified_base 1: mod_base = OTHER; note = cytidine-3'-phosphate
  modified_base 2: mod_base = OTHER; note = uridine-3'-phosphate
  modified_base 3: mod_base = OTHER; note = cytidine-3'-phosphate
  modified_base 4: mod_base = OTHER; note = uridine-3'-phosphate
  modified_base 5: mod_base = OTHER; note = guanosine-3'-phosphate
  modified_base 6: mod_base = OTHER; note = cytidine-3'-phosphate
  modified_base 7: mod_base = OTHER; note = cytidine-3'-phosphate
  modified_base 8: mod_base = OTHER; note = adenosine-3'-phosphate
  modified_base 9: mod_base = OTHER; note = adenosine-3'-phosphate
  modified_base 10: mod_base = OTHER; note = adenosine-3'-phosphate
  modified_base 11: mod_base = OTHER; note = guanosine-3'-phosphate
  modified_base 12: mod_base = OTHER; note = adenosine-3'-phosphate
  modified_base 13: mod_base = OTHER; note = uridine-3'-phosphate
  modified_base 14: mod_base = OTHER; note = guanosine-3'-phosphate
  modified_base 15: mod_base = OTHER; note = uridine-3'-phosphate
  modified_base 16: mod_base = OTHER; note = cytidine-3'-phosphate
  modified_base 17: mod_base = OTHER; note = adenosine-3'-phosphate
  modified_base 18: mod_base = OTHER; note = uridine-3'-phosphate
  modified_base 19: mod_base = OTHER; note = cytidine-3'-phosphate
  modified_base 20: mod_base = OTHER; note = 2'-deoxythymidine-3'-phosphorothioate
  misc_feature 1..19: note = RNA
  misc_feature 20..21: note = DNA
ctctgccaaagatgtcatctt

SEQ ID NO: 610 - DNA, 21 bp, synthetic construct
  source 1..21: mol_type = other DNA
  modified_base 1: mod_base = OTHER; note = guanosine-3'-phosphate
  modified_base 2: mod_base = OTHER; note = adenosine-3'-phosphate
  modified_base 3: mod_base = OTHER; note = uridine-3'-phosphate
  modified_base 4: mod_base = OTHER; note = guanosine-3'-phosphate
  modified_base 5: mod_base = OTHER; note = adenosine-3'-phosphate
  modified_base 6: mod_base = OTHER; note = cytidine-3'-phosphate
  modified_base 7: mod_base = OTHER; note = adenosine-3'-phosphate
  modified_base 8: mod_base = OTHER; note = uridine-3'-phosphate
  modified_base 9: mod_base = OTHER; note = cytidine-3'-phosphate
  modified_base 10: mod_base = OTHER; note = uridine-3'-phosphate
  modified_base 11: mod_base = OTHER; note = uridine-3'-phosphate
  modified_base 12: mod_base = OTHER; note = uridine-3'-phosphate
  modified_base 13: mod_base = OTHER; note = guanosine-3'-phosphate
  modified_base 14: mod_base = OTHER; note = guanosine-3'-phosphate
  modified_base 15: mod_base = OTHER; note = cytidine-3'-phosphate
  modified_base 16: mod_base = OTHER; note = adenosine-3'-phosphate
  modified_base 17: mod_base = OTHER; note = guanosine-3'-phosphate
  modified_base 18: mod_base = OTHER; note = adenosine-3'-phosphate
  modified_base 19: mod_base = OTHER; note = guanosine-3'-phosphate
  modified_base 20: mod_base = OTHER; note = 2'-deoxythymidine-3'-phosphorothioate
  misc_feature 1..19: note = RNA
  misc_feature 20..21: note = DNA
gatgacatctttggcagagtt

SEQ ID NO: 611 - DNA, 21 bp, synthetic construct
  source 1..21: mol_type = other DNA
  modified_base 1: mod_base = OTHER; note = 2'-O-methylcytidine-3'-phosphate
  modified_base 2: mod_base = OTHER; note = 2'-O-methyluridine-3'-phosphate
  modified_base 3: mod_base = OTHER; note = 2'-O-methylcytidine-3'-phosphate
  modified_base 4: mod_base = OTHER; note = 2'-O-methyluridine-3'-phosphate
  modified_base 5: mod_base = OTHER; note = guanosine-3'-phosphate
  modified_base 6: mod_base = OTHER; note = 2'-O-methylcytidine-3'-phosphate
  modified_base 7: mod_base = OTHER; note = 2'-O-methylcytidine-3'-phosphate
  modified_base 8: mod_base = OTHER; note = adenosine-3'-phosphate
  modified_base 9: mod_base = OTHER; note = adenosine-3'-phosphate
  modified_base 10: mod_base = OTHER; note = adenosine-3'-phosphate
  modified_base 11: mod_base = OTHER; note = guanosine-3'-phosphate
  modified_base 12: mod_base = OTHER; note = adenosine-3'-phosphate
  modified_base 13: mod_base = OTHER; note = 2'-O-methyluridine-3'-phosphate
  modified_base 14: mod_base = OTHER; note = guanosine-3'-phosphate
  modified_base 15: mod_base = OTHER; note = 2'-O-methyluridine-3'-phosphate
  modified_base 16: mod_base = OTHER; note = 2'-O-methylcytidine-3'-phosphate
  modified_base 17: mod_base = OTHER; note = adenosine-3'-phosphate
  modified_base 18: mod_base = OTHER; note = 2'-O-methyluridine-3'-phosphate
  modified_base 19: mod_base = OTHER; note = 2'-O-methylcytidine-3'-phosphate
  modified_base 20: mod_base = OTHER; note = 2'-deoxythymidine-3'-phosphorothioate
  misc_feature 1..19: note = RNA
  misc_feature 20..21: note = DNA
ctctgccaaagatgtcatctt

SEQ ID NO: 612 - DNA, 21 bp, synthetic construct
  source 1..21: mol_type = other DNA
  modified_base 1: mod_base = OTHER; note = guanosine-3'-phosphate
  modified_base 2: mod_base = OTHER; note = adenosine-3'-phosphate
  modified_base 3: mod_base = OTHER; note = uridine-3'-phosphate
  modified_base 4: mod_base = OTHER; note = guanosine-3'-phosphate
  modified_base 5: mod_base = OTHER; note = adenosine-3'-phosphate
  modified_base 6: mod_base = OTHER; note = 2'-O-methylcytidine-3'-phosphate
  modified_base 7: mod_base = OTHER; note = adenosine-3'-phosphate
  modified_base 8: mod_base = OTHER; note = uridine-3'-phosphate
  modified_base 9: mod_base = OTHER; note = cytidine-3'-phosphate
  modified_base 10: mod_base = OTHER; note = uridine-3'-phosphate
  modified_base 11: mod_base = OTHER; note = uridine-3'-phosphate
  modified_base 12: mod_base = OTHER; note = uridine-3'-phosphate
  modified_base 13: mod_base = OTHER; note = guanosine-3'-phosphate
  modified_base 14: mod_base = OTHER; note = guanosine-3'-phosphate
  modified_base 15: mod_base = OTHER; note = 2'-O-methylcytidine-3'-phosphate
  modified_base 16: mod_base = OTHER; note = adenosine-3'-phosphate
  modified_base 17: mod_base = OTHER; note = guanosine-3'-phosphate
  modified_base 18: mod_base = OTHER; note = adenosine-3'-phosphate
  modified_base 19: mod_base = OTHER; note = guanosine-3'-phosphate
  modified_base 20: mod_base = OTHER; note = 2'-deoxythymidine-3'-phosphorothioate
  misc_feature 1..19: note = RNA
  misc_feature 20..21: note = DNA
gatgacatctttggcagagtt

SEQ ID NO: 613 - DNA, 21 bp, synthetic construct
  source 1..21: mol_type = other DNA
  modified_base 1: mod_base = OTHER; note = cytidine-3'-phosphate
  modified_base 2: mod_base = OTHER; note = uridine-3'-phosphate
  modified_base 3: mod_base = OTHER; note = guanosine-3'-phosphate
  modified_base 4: mod_base = OTHER; note = adenosine-3'-phosphate
  modified_base 5: mod_base = OTHER; note = guanosine-3'-phosphate
  modified_base 6: mod_base = OTHER; note = guanosine-3'-phosphate
  modified_base 7: mod_base = OTHER; note = adenosine-3'-phosphate
  modified_base 8: mod_base = OTHER; note = cytidine-3'-phosphate
  modified_base 9: mod_base = OTHER; note = cytidine-3'-phosphate
  modified_base 10: mod_base = OTHER; note = adenosine-3'-phosphate
  modified_base 11: mod_base = OTHER; note = guanosine-3'-phosphate
  modified_base 12: mod_base = OTHER; note = cytidine-3'-phosphate
  modified_base 13: mod_base = OTHER; note = guanosine-3'-phosphate
  modified_base 14: mod_base = OTHER; note = guanosine-3'-phosphate
  modified_base 15: mod_base = OTHER; note = guanosine-3'-phosphate
  modified_base 16: mod_base = OTHER; note = uridine-3'-phosphate
  modified_base 17: mod_base = OTHER; note = adenosine-3'-phosphate
  modified_base 18: mod_base = OTHER; note = cytidine-3'-phosphate
  modified_base 19: mod_base = OTHER; note = uridine-3'-phosphate
  modified_base 20: mod_base = OTHER; note = 2'-deoxythymidine-3'-phosphorothioate
  misc_feature 1..19: note = RNA
  misc_feature 20..21: note = DNA
ctgaggaccagcgggtacttt

SEQ ID NO: 614 - DNA, 21 bp, synthetic construct
  source 1..21: mol_type = other DNA
  modified_base 1: mod_base = OTHER; note = adenosine-3'-phosphate
  modified_base 2: mod_base = OTHER; note = guanosine-3'-phosphate
  modified_base 3: mod_base = OTHER; note = uridine-3'-phosphate
  modified_base 4: mod_base = OTHER; note = adenosine-3'-phosphate
  modified_base 5: mod_base = OTHER; note = cytidine-3'-phosphate
  modified_base 6: mod_base = OTHER; note = cytidine-3'-phosphate
  modified_base 7: mod_base = OTHER; note = cytidine-3'-phosphate
  modified_base 8: mod_base = OTHER; note = guanosine-3'-phosphate
  modified_base 9: mod_base = OTHER; note = cytidine-3'-phosphate
  modified_base 10: mod_base = OTHER; note = uridine-3'-phosphate
  modified_base 11: mod_base = OTHER; note = guanosine-3'-phosphate
  modified_base 12: mod_base = OTHER; note = guanosine-3'-phosphate
  modified_base 13: mod_base = OTHER; note = uridine-3'-phosphate
  modified_base 14: mod_base = OTHER; note = cytidine-3'-phosphate
  modified_base 15: mod_base = OTHER; note = cytidine-3'-phosphate
  modified_base 16: mod_base = OTHER; note = uridine-3'-phosphate
  modified_base 17: mod_base = OTHER; note = cytidine-3'-phosphate
  modified_base 18: mod_base = OTHER; note = adenosine-3'-phosphate
  modified_base 19: mod_base = OTHER; note = guanosine-3'-phosphate
  modified_base 20: mod_base = OTHER; note = 2'-deoxythymidine-3'-phosphorothioate
  misc_feature 1..19: note = RNA
  misc_feature 20..21: note = DNA
agtacccgctggtcctcagtt

SEQ ID NO: 615 - DNA, 21 bp, synthetic construct
  source 1..21: mol_type = other DNA
  modified_base 1: mod_base = OTHER; note = 2'-O-methylcytidine-3'-phosphate
  modified_base 2: mod_base = OTHER; note = 2'-O-methyluridine-3'-phosphate
  modified_base 3: mod_base = OTHER; note = guanosine-3'-phosphate
  modified_base 4: mod_base = OTHER; note = adenosine-3'-phosphate
  modified_base 5: mod_base = OTHER; note = guanosine-3'-phosphate
  modified_base 6: mod_base = OTHER; note = guanosine-3'-phosphate
  modified_base 7: mod_base = OTHER; note = adenosine-3'-phosphate
  modified_base 8: mod_base = OTHER; note = 2'-O-methylcytidine-3'-phosphate
  modified_base 9: mod_base = OTHER; note = 2'-O-methylcytidine-3'-phosphate
  modified_base 10: mod_base = OTHER; note = adenosine-3'-phosphate
  modified_base 11: mod_base = OTHER; note = guanosine-3'-phosphate
  modified_base 12: mod_base = OTHER; note = 2'-O-methylcytidine-3'-phosphate
  modified_base 13: mod_base = OTHER; note = guanosine-3'-phosphate
  modified_base 14: mod_base = OTHER; note = guanosine-3'-phosphate
  modified_base 15: mod_base = OTHER; note = guanosine-3'-phosphate
  modified_base 16: mod_base = OTHER; note = 2'-O-methyluridine-3'-phosphate
  modified_base 17: mod_base = OTHER; note = adenosine-3'-phosphate
  modified_base 18: mod_base = OTHER; note = 2'-O-methylcytidine-3'-phosphate
  modified_base 19: mod_base = OTHER; note = 2'-O-methyluridine-3'-phosphate
  modified_base 20: mod_base = OTHER; note = 2'-deoxythymidine-3'-phosphorothioate
  misc_feature 1..19: note = RNA
  misc_feature 20..21: note = DNA
ctgaggaccagcgggtacttt

SEQ ID NO: 616 - DNA, 21 bp, synthetic construct
  source 1..21: mol_type = other DNA
  modified_base 1: mod_base = OTHER; note = adenosine-3'-phosphate
  modified_base 2: mod_base = OTHER; note = guanosine-3'-phosphate
  modified_base 3: mod_base = OTHER; note = 2'-O-methyluridine-3'-phosphate
  modified_base 4: mod_base = OTHER; note = adenosine-3'-phosphate
  modified_base 5: mod_base = OTHER; note = cytidine-3'-phosphate
  modified_base 6: mod_base = OTHER; note = cytidine-3'-phosphate
  modified_base 7: mod_base = OTHER; note = cytidine-3'-phosphate
  modified_base 8: mod_base = OTHER; note = guanosine-3'-phosphate
  modified_base 9: mod_base = OTHER; note = cytidine-3'-phosphate
  modified_base 10: mod_base = OTHER; note = uridine-3'-phosphate
  modified_base 11: mod_base = OTHER; note = guanosine-3'-phosphate
  modified_base 12: mod_base = OTHER; note = guanosine-3'-phosphate
  modified_base 13: mod_base = OTHER; note = uridine-3'-phosphate
  modified_base 14: mod_base = OTHER; note = cytidine-3'-phosphate
  modified_base 15: mod_base = OTHER; note = cytidine-3'-phosphate
  modified_base 16: mod_base = OTHER; note = uridine-3'-phosphate
  modified_base 17: mod_base = OTHER; note = 2'-O-methylcytidine-3'-phosphate
  modified_base 18: mod_base = OTHER; note = adenosine-3'-phosphate
  modified_base 19: mod_base = OTHER; note = guanosine-3'-phosphate
  modified_base 20: mod_base = OTHER; note = 2'-deoxythymidine-3'-phosphorothioate
  misc_feature 1..19: note = RNA
  misc_feature 20..21: note = DNA
agtacccgctggtcctcagtt

SEQ ID NO: 617 - DNA, 21 bp, synthetic construct
  source 1..21: mol_type = other DNA
  modified_base 1: mod_base = OTHER; note = uridine-3'-phosphate
  modified_base 2: mod_base = OTHER; note = guanosine-3'-phosphate
  modified_base 3: mod_base = OTHER; note = adenosine-3'-phosphate
  modified_base 4: mod_base = OTHER; note = guanosine-3'-phosphate
  modified_base 5: mod_base = OTHER; note = guanosine-3'-phosphate
  modified_base 6: mod_base = OTHER; note = adenosine-3'-phosphate
  modified_base 7: mod_base = OTHER; note = cytidine-3'-phosphate
  modified_base 8: mod_base = OTHER; note = cytidine-3'-phosphate
  modified_base 9: mod_base = OTHER; note = adenosine-3'-phosphate
  modified_base 10: mod_base = OTHER; note = guanosine-3'-phosphate
  modified_base 11: mod_base = OTHER; note = cytidine-3'-phosphate
  modified_base 12: mod_base = OTHER; note = guanosine-3'-phosphate
  modified_base 13: mod_base = OTHER; note = guanosine-3'-phosphate
  modified_base 14: mod_base = OTHER; note = guanosine-3'-phosphate
  modified_base 15: mod_base = OTHER; note = uridine-3'-phosphate
  modified_base 16: mod_base = OTHER; note = adenosine-3'-phosphate
  modified_base 17: mod_base = OTHER; note = cytidine-3'-phosphate
  modified_base 18: mod_base = OTHER; note = uridine-3'-phosphate
  modified_base 19: mod_base = OTHER; note = guanosine-3'-phosphate
  modified_base 20: mod_base = OTHER; note = 2'-deoxythymidine-3'-phosphorothioate
  misc_feature 1..19: note = RNA
  misc_feature 20..21: note = DNA
tgaggaccagcgggtactgtt

SEQ ID NO: 618 - DNA, 21 bp, synthetic construct
  source 1..21: mol_type = other DNA
  modified_base 1: mod_base = OTHER; note = cytidine-3'-phosphate
  modified_base 2: mod_base = OTHER; note = adenosine-3'-phosphate
  modified_base 3: mod_base = OTHER; note = guanosine-3'-phosphate
  modified_base 4: mod_base = OTHER; note = uridine-3'-phosphate
  modified_base 5: mod_base = OTHER; note = adenosine-3'-phosphate
  modified_base 6: mod_base = OTHER; note = cytidine-3'-phosphate
  modified_base 7: mod_base = OTHER; note = cytidine-3'-phosphate
  modified_base 8: mod_base = OTHER; note = cytidine-3'-phosphate
  modified_base 9: mod_base = OTHER; note = guanosine-3'-phosphate
  modified_base 10: mod_base = OTHER; note = cytidine-3'-phosphate
  modified_base 11: mod_base = OTHER; note = uridine-3'-phosphate
  modified_base 12: mod_base = OTHER; note = guanosine-3'-phosphate
  modified_base 13: mod_base = OTHER; note = guanosine-3'-phosphate
  modified_base 14: mod_base = OTHER; note = uridine-3'-phosphate
  modified_base 15: mod_base = OTHER; note = cytidine-3'-phosphate
  modified_base 16: mod_base = OTHER; note = cytidine-3'-phosphate
  modified_base 17: mod_base = OTHER; note = uridine-3'-phosphate
  modified_base 18: mod_base = OTHER; note = cytidine-3'-phosphate
  modified_base 19: mod_base = OTHER; note = adenosine-3'-phosphate
  modified_base 20: mod_base = OTHER; note = 2'-deoxythymidine-3'-phosphorothioate
  misc_feature 1..19: note = RNA
  misc_feature 20..21: note = DNA
cagtacccgctggtcctcatt

SEQ ID NO: 619 - DNA, 21 bp, synthetic construct
  source 1..21: mol_type = other DNA
  modified_base 1: mod_base = OTHER; note = 2'-O-methyluridine-3'-phosphate
  modified_base 2: mod_base = OTHER; note = guanosine-3'-phosphate
  modified_base 3: mod_base = OTHER; note = adenosine-3'-phosphate
  modified_base 4: mod_base = OTHER; note = guanosine-3'-phosphate
  modified_base 5: mod_base = OTHER; note = guanosine-3'-phosphate
  modified_base 6: mod_base = OTHER; note = adenosine-3'-phosphate
  modified_base 7: mod_base = OTHER; note = 2'-O-methylcytidine-3'-phosphate
  modified_base 8: mod_base = OTHER; note = 2'-O-methylcytidine-3'-phosphate
  modified_base 9: mod_base = OTHER; note = adenosine-3'-phosphate
  modified_base 10: mod_base = OTHER; note = guanosine-3'-phosphate
  modified_base 11: mod_base = OTHER; note = 2'-O-methylcytidine-3'-phosphate
  modified_base 12: mod_base = OTHER; note = guanosine-3'-phosphate
  modified_base 13: mod_base = OTHER; note = guanosine-3'-phosphate
  modified_base 14: mod_base = OTHER; note = guanosine-3'-phosphate
  modified_base 15: mod_base = OTHER; note = 2'-O-methyluridine-3'-phosphate
  modified_base 16: mod_base = OTHER; note = adenosine-3'-phosphate
  modified_base 17: mod_base = OTHER; note = 2'-O-methylcytidine-3'-phosphate
  modified_base 18: mod_base = OTHER; note = 2'-O-methyluridine-3'-phosphate
  modified_base 19: mod_base = OTHER; note = guanosine-3'-phosphate
  modified_base 20: mod_base = OTHER; note = 2'-deoxythymidine-3'-phosphorothioate
  misc_feature 1..19: note = RNA
  misc_feature 20..21: note = DNA
tgaggaccagcgggtactgtt

SEQ ID NO: 620 - DNA, 21 bp, synthetic construct
  source 1..21: mol_type = other DNA
  modified_base 1: mod_base = OTHER; note = 2'-O-methylcytidine-3'-phosphate
  modified_base 2: mod_base = OTHER; note = adenosine-3'-phosphate
  modified_base 3: mod_base = OTHER; note = guanosine-3'-phosphate
  modified_base 4: mod_base = OTHER; note = 2'-O-methyluridine-3'-phosphate
  modified_base 5: mod_base = OTHER; note = adenosine-3'-phosphate
  modified_base 6: mod_base = OTHER; note = cytidine-3'-phosphate
  modified_base 7: mod_base = OTHER; note = cytidine-3'-phosphate
  modified_base 8: mod_base = OTHER; note = cytidine-3'-phosphate
  modified_base 9: mod_base = OTHER; note = guanosine-3'-phosphate
  modified_base 10: mod_base = OTHER; note = cytidine-3'-phosphate
  modified_base 11: mod_base = OTHER; note = uridine-3'-phosphate
  modified_base 12: mod_base = OTHER; note = guanosine-3'-phosphate
  modified_base 13: mod_base = OTHER; note = guanosine-3'-phosphate
  modified_base 14: mod_base = OTHER; note = uridine-3'-phosphate
  modified_base 15: mod_base = OTHER; note = cytidine-3'-phosphate
  modified_base 16: mod_base = OTHER; note = cytidine-3'-phosphate
  modified_base 17: mod_base = OTHER; note = uridine-3'-phosphate
  modified_base 18: mod_base = OTHER; note = 2'-O-methylcytidine-3'-phosphate
  modified_base 19: mod_base = OTHER; note = adenosine-3'-phosphate
  modified_base 20: mod_base = OTHER; note = 2'-deoxythymidine-3'-phosphorothioate
  misc_feature 1..19: note = RNA
  misc_feature 20..21: note = DNA
cagtacccgctggtcctcatt

SEQ ID NO: 621 - DNA, 21 bp, synthetic construct
  source 1..21: mol_type = other DNA
  modified_base 1: mod_base = OTHER; note = adenosine-3'-phosphate
  modified_base 2: mod_base = OTHER; note = cytidine-3'-phosphate
  modified_base 3: mod_base = OTHER; note = uridine-3'-phosphate
  modified_base 4: mod_base = OTHER; note = guanosine-3'-phosphate
  modified_base 5: mod_base = OTHER; note = uridine-3'-phosphate
  modified_base 6: mod_base = OTHER; note = adenosine-3'-phosphate
  modified_base 7: mod_base = OTHER; note = uridine-3'-phosphate
  modified_base 8: mod_base = OTHER; note = guanosine-3'-phosphate
  modified_base 9: mod_base = OTHER; note = guanosine-3'-phosphate
  modified_base 10: mod_base = OTHER; note = uridine-3'-phosphate
  modified_base 11: mod_base = OTHER; note = cytidine-3'-phosphate
  modified_base 12: mod_base = OTHER; note = adenosine-3'-phosphate
  modified_base 13: mod_base = OTHER; note = guanosine-3'-phosphate
  modified_base 14: mod_base = OTHER; note = cytidine-3'-phosphate
  modified_base 15: mod_base = OTHER; note = adenosine-3'-phosphate
  modified_base 16: mod_base = OTHER; note = cytidine-3'-phosphate
  modified_base 17: mod_base = OTHER; note = adenosine-3'-phosphate
  modified_base 18: mod_base = OTHER; note = cytidine-3'-phosphate
  modified_base 19: mod_base = OTHER; note = uridine-3'-phosphate
  misc_feature 1..19: note = RNA
  misc_feature 20..21: note = DNA
actgtatggtcagcacacttt

SEQ ID NO: 622 - DNA, 21 bp, synthetic construct
  source 1..21: mol_type = other DNA
  modified_base 1: mod_base = OTHER; note = adenosine-3'-phosphate
  modified_base 2: mod_base = OTHER; note = guanosine-3'-phosphate
  modified_base 3: mod_base = OTHER; note = uridine-3'-phosphate
  modified_base 4: mod_base = OTHER; note = guanosine-3'-phosphate
  modified_base 5: mod_base = OTHER; note = uridine-3'-phosphate
  modified_base 6: mod_base = OTHER; note = guanosine-3'-phosphate
  modified_base 7: mod_base = OTHER; note = cytidine-3'-phosphate
  modified_base 8: mod_base = OTHER; note = uridine-3'-phosphate
  modified_base 9: mod_base = OTHER; note = guanosine-3'-phosphate
  modified_base 10: mod_base = OTHER; note = adenosine-3'-phosphate
  modified_base 11: mod_base = OTHER; note = cytidine-3'-phosphate
  modified_base 12: mod_base = OTHER; note = cytidine-3'-phosphate
  modified_base 13: mod_base = OTHER; note = adenosine-3'-phosphate
  modified_base 14: mod_base = OTHER; note = uridine-3'-phosphate
  modified_base 15: mod_base = OTHER; note = adenosine-3'-phosphate
  modified_base 16: mod_base = OTHER; note = cytidine-3'-phosphate
  modified_base 17: mod_base = OTHER; note = adenosine-3'-phosphate
  modified_base 18: mod_base = OTHER; note = guanosine-3'-phosphate
  modified_base 19: mod_base = OTHER; note = uridine-3'-phosphate
  misc_feature 1..19: note = RNA
  misc_feature 20..21: note = DNA
agtgtgctgaccatacagttt

SEQ ID NO: 623 - DNA, 21 bp, synthetic construct
  source 1..21: mol_type = other DNA
  modified_base 1: mod_base = OTHER; note = uridine-3'-phosphate
  modified_base 2: mod_base = OTHER; note = guanosine-3'-phosphate
  modified_base 3: mod_base = OTHER; note = uridine-3'-phosphate
  modified_base 4: mod_base = OTHER; note = adenosine-3'-phosphate
  modified_base 5: mod_base = OTHER; note = uridine-3'-phosphate
  modified_base 6: mod_base = OTHER; note = guanosine-3'-phosphate
  modified_base 7: mod_base = OTHER; note = guanosine-3'-phosphate
  modified_base 8: mod_base = OTHER; note = uridine-3'-phosphate
  modified_base 9: mod_base = OTHER; note = cytidine-3'-phosphate
  modified_base 10: mod_base = OTHER; note = adenosine-3'-phosphate
  modified_base 11: mod_base = OTHER; note = guanosine-3'-phosphate
  modified_base 12: mod_base = OTHER; note = cytidine-3'-phosphate
  modified_base 13: mod_base = OTHER; note = adenosine-3'-phosphate
  modified_base 14: mod_base = OTHER; note = cytidine-3'-phosphate
  modified_base 15: mod_base = OTHER; note = adenosine-3'-phosphate
  modified_base 16: mod_base = OTHER; note = cytidine-3'-phosphate
  modified_base 17: mod_base = OTHER; note = uridine-3'-phosphate
  modified_base 18: mod_base = OTHER; note = cytidine-3'-phosphate
  modified_base 19: mod_base = OTHER; note = guanosine-3'-phosphate
  misc_feature 1..19: note = RNA
  misc_feature 20..21: note = DNA
tgtatggtcagcacactcgtt

SEQ ID NO: 624 - DNA, 21 bp, synthetic construct
  source 1..21: mol_type = other DNA
  modified_base 1: mod_base = OTHER; note = cytidine-3'-phosphate
  modified_base 2: mod_base = OTHER; note = guanosine-3'-phosphate
  modified_base 3: mod_base = OTHER; note = adenosine-3'-phosphate
  modified_base 4: mod_base = OTHER; note = guanosine-3'-phosphate
  modified_base 5: mod_base = OTHER; note = uridine-3'-phosphate
  modified_base 6: mod_base = OTHER; note = guanosine-3'-phosphate
  modified_base 7: mod_base = OTHER; note = uridine-3'-phosphate
  modified_base 8: mod_base = OTHER; note = guanosine-3'-phosphate
  modified_base 9: mod_base = OTHER; note = cytidine-3'-phosphate
  modified_base 10: mod_base = OTHER; note = uridine-3'-phosphate
  modified_base 11: mod_base = OTHER; note = guanosine-3'-phosphate
  modified_base 12: mod_base = OTHER; note = adenosine-3'-phosphate
  modified_base 13: mod_base = OTHER; note = cytidine-3'-phosphate
  modified_base 14: mod_base = OTHER; note = cytidine-3'-phosphate
  modified_base 15: mod_base = OTHER; note = adenosine-3'-phosphate
  modified_base 16: mod_base = OTHER; note = uridine-3'-phosphate
  modified_base 17: mod_base = OTHER; note = adenosine-3'-phosphate
  modified_base 18: mod_base = OTHER; note = cytidine-3'-phosphate
  modified_base 19: mod_base = OTHER; note = adenosine-3'-phosphate
  misc_feature 1..19: note = RNA
  misc_feature 20..21: note = DNA
cgagtgtgctgaccatacatt

SEQ ID NO: 625 - DNA, 21 bp, synthetic construct
  source 1..21: mol_type = other DNA
  modified_base 1: mod_base = OTHER; note = guanosine-3'-phosphate
  modified_base 2: mod_base = OTHER; note = uridine-3'-phosphate
  modified_base 3: mod_base = OTHER; note = adenosine-3'-phosphate
  modified_base 4: mod_base = OTHER; note = uridine-3'-phosphate
  modified_base 5: mod_base = OTHER; note = guanosine-3'-phosphate
  modified_base 6: mod_base = OTHER; note = guanosine-3'-phosphate
  modified_base 7: mod_base = OTHER; note = uridine-3'-phosphate
  modified_base 8: mod_base = OTHER; note = cytidine-3'-phosphate
  modified_base 9: mod_base = OTHER; note = adenosine-3'-phosphate
  modified_base 10: mod_base = OTHER; note = guanosine-3'-phosphate
  modified_base 11: mod_base = OTHER; note = cytidine-3'-phosphate
  modified_base 12: mod_base = OTHER; note = adenosine-3'-phosphate
  modified_base 13: mod_base = OTHER; note = cytidine-3'-phosphate
  modified_base 14: mod_base = OTHER; note = adenosine-3'-phosphate
  modified_base 15: mod_base = OTHER; note = cytidine-3'-phosphate
  modified_base 16: mod_base = OTHER; note = uridine-3'-phosphate
  modified_base 17: mod_base = OTHER; note = cytidine-3'-phosphate
  modified_base 18: mod_base = OTHER; note = guanosine-3'-phosphate
  modified_base 19: mod_base = OTHER; note = guanosine-3'-phosphate
  misc_feature 1..19: note = RNA
  misc_feature 20..21: note = DNA
gtatggtcagcacactcggtt

SEQ ID NO: 626 - DNA, 21 bp, synthetic construct
  source 1..21: mol_type = other DNA
  modified_base 1: mod_base = OTHER; note = cytidine-3'-phosphate
  modified_base 2: mod_base = OTHER; note = cytidine-3'-phosphate
  modified_base 3: mod_base = OTHER; note = guanosine-3'-phosphate
  modified_base 4: mod_base = OTHER; note = adenosine-3'-phosphate
  modified_base 5: mod_base = OTHER; note = guanosine-3'-phosphate
  modified_base 6: mod_base = OTHER; note = uridine-3'-phosphate
  modified_base 7: mod_base = OTHER; note = guanosine-3'-phosphate
  modified_base 8: mod_base = OTHER; note = uridine-3'-phosphate
  modified_base 9: mod_base = OTHER; note = guanosine-3'-phosphate
  modified_base 10: mod_base = OTHER; note = cytidine-3'-phosphate
  modified_base 11: mod_base = OTHER; note = uridine-3'-phosphate
  modified_base 12: mod_base = OTHER; note = guanosine-3'-phosphate
  modified_base 13: mod_base = OTHER; note = adenosine-3'-phosphate
  modified_base 14: mod_base = OTHER; note = cytidine-3'-phosphate
  modified_base 15: mod_base = OTHER; note = cytidine-3'-phosphate
  modified_base 16: mod_base = OTHER; note = adenosine-3'-phosphate
  modified_base 17: mod_base = OTHER; note = uridine-3'-phosphate
  modified_base 18: mod_base = OTHER; note = adenosine-3'-phosphate
  modified_base 19: mod_base = OTHER; note = cytidine-3'-phosphate
  misc_feature 1..19: note = RNA
  misc_feature 20..21: note = DNA
ccgagtgtgctgaccatactt

SEQ ID NO: 627 - DNA, 21 bp, synthetic construct
  source 1..21: mol_type = other DNA
  modified_base 1: mod_base = OTHER; note = guanosine-3'-phosphate
  modified_base 2: mod_base = OTHER; note = guanosine-3'-phosphate
  modified_base 3: mod_base = OTHER; note = adenosine-3'-phosphate
  modified_base 4: mod_base = OTHER; note = uridine-3'-phosphate
  modified_base 5: mod_base = OTHER; note = guanosine-3'-phosphate
  modified_base 6: mod_base = OTHER; note = guanosine-3'-phosphate
  modified_base 7: mod_base = OTHER; note = cytidine-3'-phosphate
  modified_base 8: mod_base = OTHER; note = cytidine-3'-phosphate
  modified_base 9: mod_base = OTHER; note = adenosine-3'-phosphate
  modified_base 10: mod_base = OTHER; note = cytidine-3'-phosphate
  modified_base 11: mod_base = OTHER; note = adenosine-3'-phosphate
  modified_base 12: mod_base = OTHER; note = guanosine-3'-phosphate
  modified_base 13: mod_base = OTHER; note = cytidine-3'-phosphate
  modified_base 14: mod_base = OTHER; note = cytidine-3'-phosphate
  modified_base 15: mod_base = OTHER; note = guanosine-3'-phosphate
  modified_base 16: mod_base = OTHER; note = uridine-3'-phosphate
  modified_base 17: mod_base = OTHER; note = cytidine-3'-phosphate
  modified_base 18: mod_base = OTHER; note = guanosine-3'-phosphate
  modified_base 19: mod_base = OTHER; note = cytidine-3'-phosphate
  misc_feature 1..19: note = RNA
  misc_feature 20..21: note = DNA
ggatggccacagccgtcgctt

SEQ ID NO: 628 - DNA, 21 bp, synthetic construct
  source 1..21: mol_type = other DNA
  modified_base 1: mod_base = OTHER; note = guanosine-3'-phosphate
  modified_base 2: mod_base = OTHER; note = cytidine-3'-phosphate
  modified_base 3: mod_base = OTHER; note = guanosine-3'-phosphate
  modified_base 4: mod_base = OTHER; note = adenosine-3'-phosphate
  modified_base 5: mod_base = OTHER; note = cytidine-3'-phosphate
  modified_base 6: mod_base = OTHER; note = guanosine-3'-phosphate
  modified_base 7: mod_base = OTHER; note = guanosine-3'-phosphate
  modified_base 8: mod_base = OTHER; note = cytidine-3'-phosphate
  modified_base 9: mod_base = OTHER; note = uridine-3'-phosphate
  modified_base 10: mod_base = OTHER; note = guanosine-3'-phosphate
  modified_base 11: mod_base = OTHER; note = uridine-3'-phosphate
  modified_base 12: mod_base = OTHER; note = guanosine-3'-phosphate
  modified_base 13: mod_base = OTHER; note = guanosine-3'-phosphate
  modified_base 14: mod_base = OTHER; note = cytidine-3'-phosphate
  modified_base 15: mod_base = OTHER; note = cytidine-3'-phosphate
  modified_base 16: mod_base = OTHER; note = adenosine-3'-phosphate
  modified_base 17: mod_base = OTHER; note = uridine-3'-phosphate
  modified_base 18: mod_base = OTHER; note = cytidine-3'-phosphate
  modified_base 19: mod_base = OTHER; note = cytidine-3'-phosphate
  misc_feature 1..19: note = RNA
  misc_feature 20..21: note = DNA
gcgacggctgtggccatcctt

SEQ ID NO: 629 - DNA, 21 bp, synthetic construct
  source 1..21: mol_type = other DNA
  modified_base 1: mod_base = OTHER; note = guanosine-3'-phosphate
  modified_base 2: mod_base = OTHER; note = adenosine-3'-phosphate
  modified_base 3: mod_base = OTHER; note = uridine-3'-phosphate
  modified_base 4: mod_base = OTHER; note = guanosine-3'-phosphate
  modified_base 5: mod_base = OTHER; note = guanosine-3'-phosphate
  modified_base 6: mod_base = OTHER; note = cytidine-3'-phosphate
  modified_base 7: mod_base = OTHER; note = cytidine-3'-phosphate
  modified_base 8: mod_base = OTHER; note = adenosine-3'-phosphate
  modified_base 9: mod_base = OTHER; note = cytidine-3'-phosphate
  modified_base 10: mod_base = OTHER; note = adenosine-3'-phosphate
  modified_base 11: mod_base = OTHER; note = guanosine-3'-phosphate
  modified_base 12: mod_base = OTHER; note = cytidine-3'-phosphate
  modified_base 13: mod_base = OTHER; note = cytidine-3'-phosphate
  modified_base 14: mod_base = OTHER; note = guanosine-3'-phosphate
  modified_base 15: mod_base = OTHER; note = uridine-3'-phosphate
  modified_base 16: mod_base = OTHER; note = cytidine-3'-phosphate
  modified_base 17: mod_base = OTHER; note = guanosine-3'-phosphate
  modified_base 18: mod_base = OTHER; note = cytidine-3'-phosphate
  modified_base 19: mod_base = OTHER; note = cytidine-3'-phosphate
  misc_feature 1..19: note = RNA
  misc_feature 20..21: note = DNA
gatggccacagccgtcgcctt

SEQ ID NO: 630 - DNA, 21 bp, synthetic construct
  source 1..21: mol_type = other DNA
  modified_base 1: mod_base = OTHER; note = guanosine-3'-phosphate
  modified_base 2: mod_base = OTHER; note = guanosine-3'-phosphate
  modified_base 3: mod_base = OTHER; note = cytidine-3'-phosphate
  modified_base 4: mod_base = OTHER; note = guanosine-3'-phosphate
  modified_base 5: mod_base = OTHER; note = adenosine-3'-phosphate
  modified_base 6: mod_base = OTHER; note = cytidine-3'-phosphate
  modified_base 7: mod_base = OTHER; note = guanosine-3'-phosphate
  modified_base 8: mod_base = OTHER; note = guanosine-3'-phosphate
  modified_base 9: mod_base = OTHER; note = cytidine-3'-phosphate
  modified_base 10: mod_base = OTHER; note = uridine-3'-phosphate
  modified_base 11: mod_base = OTHER; note = guanosine-3'-phosphate
  modified_base 12: mod_base = OTHER; note = uridine-3'-phosphate
  modified_base 13: mod_base = OTHER; note = guanosine-3'-phosphate
  modified_base 14: mod_base = OTHER; note = guanosine-3'-phosphate
  modified_base 15: mod_base = OTHER; note = cytidine-3'-phosphate
  modified_base 16: mod_base = OTHER; note = cytidine-3'-phosphate
  modified_base 17: mod_base = OTHER; note = adenosine-3'-phosphate
  modified_base 18: mod_base = OTHER; note = uridine-3'-phosphate
  modified_base 19: mod_base = OTHER; note = cytidine-3'-phosphate
  misc_feature 1..19: note = RNA
  misc_feature 20..21: note = DNA
ggcgacggctgtggccatctt

SEQ ID NO: 631 - DNA, 21 bp, synthetic construct
  source 1..21: mol_type = other DNA
  modified_base 1: mod_base = OTHER; note = cytidine-3'-phosphate
  modified_base 2: mod_base = OTHER; note = adenosine-3'-phosphate
  modified_base 3: mod_base = OTHER; note = adenosine-3'-phosphate
  modified_base 4: mod_base = OTHER; note = guanosine-3'-phosphate
  modified_base 5: mod_base = OTHER; note = cytidine-3'-phosphate
  modified_base 6: mod_base = OTHER; note = uridine-3'-phosphate
  modified_base 7: mod_base = OTHER; note = guanosine-3'-phosphate
  modified_base 8: mod_base = OTHER; note = guanosine-3'-phosphate
  modified_base 9: mod_base = OTHER; note = uridine-3'-phosphate
  modified_base 10: mod_base = OTHER; note = cytidine-3'-phosphate
  modified_base 11: mod_base = OTHER; note = uridine-3'-phosphate
  modified_base 12: mod_base = OTHER; note = guanosine-3'-phosphate
  modified_base 13: mod_base = OTHER; note = cytidine-3'-phosphate
  modified_base 14: mod_base = OTHER; note = cytidine-3'-phosphate
  modified_base 15: mod_base = OTHER; note = guanosine-3'-phosphate
  modified_base 16: mod_base = OTHER; note = guanosine-3'-phosphate
  modified_base 17: mod_base = OTHER; note = guanosine-3'-phosphate
  modified_base 18: mod_base = OTHER; note = cytidine-3'-phosphate
  modified_base 19: mod_base = OTHER; note = cytidine-3'-phosphate
  misc_feature 1..19: note = RNA
  misc_feature 20..21: note = DNA
caagctggtctgccgggcctt

SEQ ID NO: 632 - DNA, 21 bp, synthetic construct
  source 1..21: mol_type = other DNA
  modified_base 1: mod_base = OTHER; note = guanosine-3'-phosphate
  modified_base 2: mod_base = OTHER; note = guanosine-3'-phosphate
  modified_base 3: mod_base = OTHER; note = cytidine-3'-phosphate
  modified_base 4: mod_base = OTHER; note = cytidine-3'-phosphate
  modified_base 5: mod_base = OTHER; note = cytidine-3'-phosphate
  modified_base 6: mod_base = OTHER; note = guanosine-3'-phosphate
  modified_base 7: mod_base = OTHER; note = guanosine-3'-phosphate
  modified_base 8: mod_base = OTHER; note = cytidine-3'-phosphate
  modified_base 9: mod_base = OTHER; note = adenosine-3'-phosphate
  modified_base 10: mod_base = OTHER; note = guanosine-3'-phosphate
  modified_base 11: mod_base = OTHER; note = adenosine-3'-phosphate
  modified_base 12: mod_base = OTHER; note = cytidine-3'-phosphate
  modified_base 13: mod_base = OTHER; note = cytidine-3'-phosphate
  modified_base 14: mod_base = OTHER; note = adenosine-3'-phosphate
  modified_base 15: mod_base = OTHER; note = guanosine-3'-phosphate
  modified_base 16: mod_base = OTHER; note = cytidine-3'-phosphate
  modified_base 17: mod_base = OTHER; note = uridine-3'-phosphate
  modified_base 18: mod_base = OTHER; note = uridine-3'-phosphate
  modified_base 19: mod_base = OTHER; note = guanosine-3'-phosphate
  misc_feature 1..19: note = RNA
  misc_feature 20..21: note = DNA
ggcccggcagaccagcttgtt

SEQ ID NO: 633 - DNA, 21 bp, synthetic construct
  source 1..21: mol_type = other DNA
  modified_base 1: mod_base = OTHER; note = cytidine-3'-phosphate
  modified_base 2: mod_base = OTHER; note = uridine-3'-phosphate
  modified_base 3: mod_base = OTHER; note = guanosine-3'-phosphate
  modified_base 4: mod_base = OTHER; note = cytidine-3'-phosphate
  modified_base 5: mod_base = OTHER; note = cytidine-3'-phosphate
  modified_base 6: mod_base = OTHER; note = guanosine-3'-phosphate
  modified_base 7: mod_base = OTHER; note = guanosine-3'-phosphate
  modified_base 8: mod_base = OTHER; note = guanosine-3'-phosphate
  modified_base 9: mod_base = OTHER; note = cytidine-3'-phosphate
  modified_base 10: mod_base = OTHER; note = cytidine-3'-phosphate
  modified_base 11: mod_base = OTHER; note = cytidine-3'-phosphate
  modified_base 12: mod_base = OTHER; note = adenosine-3'-phosphate
  modified_base 13: mod_base = OTHER; note = cytidine-3'-phosphate
  modified_base 14: mod_base = OTHER; note = adenosine-3'-phosphate
  modified_base 15: mod_base = OTHER; note = adenosine-3'-phosphate
  modified_base 16: mod_base = OTHER; note = cytidine-3'-phosphate
  modified_base 17: mod_base = OTHER; note = guanosine-3'-phosphate
  modified_base 18: mod_base = OTHER; note = cytidine-3'-phosphate
  modified_base 19: mod_base = OTHER; note = uridine-3'-phosphate
  modified_base 20: mod_base = OTHER; note = 2'-deoxythymidine-3'-phosphorothioate
  misc_feature 1..19: note = RNA
  misc_feature 20..21: note = DNA
ctgccgggcccacaacgcttt

SEQ ID NO: 634 - DNA, 21 bp, synthetic construct
  source 1..21: mol_type = other DNA
  modified_base 1: mod_base = OTHER; note = adenosine-3'-phosphate
  modified_base 2: mod_base = OTHER; note = guanosine-3'-phosphate
  modified_base 3: mod_base = OTHER; note = cytidine-3'-phosphate
  modified_base 4: mod_base = OTHER; note = guanosine-3'-phosphate
  modified_base 5: mod_base = OTHER; note = uridine-3'-phosphate
  modified_base 6: mod_base = OTHER; note = uridine-3'-phosphate
  modified_base 7: mod_base = OTHER; note = guanosine-3'-phosphate
  modified_base 8: mod_base = OTHER; note = uridine-3'-phosphate
  modified_base 9: mod_base = OTHER; note = guanosine-3'-phosphate
  modified_base 10: mod_base = OTHER; note = guanosine-3'-phosphate
  modified_base 11: mod_base = OTHER; note = guanosine-3'-phosphate
  modified_base 12: mod_base = OTHER; note = cytidine-3'-phosphate
  modified_base 13: mod_base = OTHER; note = cytidine-3'-phosphate
  modified_base 14: mod_base = OTHER; note = cytidine-3'-phosphate
  modified_base 15: mod_base = OTHER; note = guanosine-3'-phosphate
  modified_base 16: mod_base = OTHER; note = guanosine-3'-phosphate
  modified_base 17: mod_base = OTHER; note = cytidine-3'-phosphate
  modified_base 18: mod_base = OTHER; note = adenosine-3'-phosphate
  modified_base 19: mod_base = OTHER; note = guanosine-3'-phosphate
  modified_base 20: mod_base = OTHER; note = 2'-deoxythymidine-3'-phosphorothioate
  misc_feature 1..19: note = RNA
  misc_feature 20..21: note = DNA
agcgttgtgggcccggcagtt

SEQ ID NO: 635 - DNA, 21 bp, synthetic construct
  source 1..21: mol_type = other DNA
  modified_base 1: mod_base = OTHER; note = 2'-O-methylcytidine-3'-phosphate
  modified_base 2: mod_base = OTHER; note = 2'-O-methyluridine-3'-phosphate
  modified_base 3: mod_base = OTHER; note = guanosine-3'-phosphate
  modified_base 4: mod_base = OTHER; note = 2'-O-methylcytidine-3'-phosphate
  modified_base 5: mod_base = OTHER; note = 2'-O-methylcytidine-3'-phosphate
  modified_base 6: mod_base = OTHER; note = guanosine-3'-phosphate
  modified_base 7: mod_base = OTHER; note = guanosine-3'-phosphate
  modified_base 8: mod_base = OTHER; note = guanosine-3'-phosphate
  modified_base 9: mod_base = OTHER; note = 2'-O-methylcytidine-3'-phosphate
  modified_base 10: mod_base = OTHER; note = 2'-O-methylcytidine-3'-phosphate
  modified_base 11: mod_base = OTHER; note = 2'-O-methylcytidine-3'-phosphate
  modified_base 12: mod_base = OTHER; note = adenosine-3'-phosphate
  modified_base 13: mod_base = OTHER; note = 2'-O-methylcytidine-3'-phosphate
  modified_base 14: mod_base = OTHER; note = adenosine-3'-phosphate
  modified_base 15: mod_base = OTHER; note = adenosine-3'-phosphate
  modified_base 16: mod_base = OTHER; note = 2'-O-methylcytidine-3'-phosphate
  modified_base 17: mod_base = OTHER; note = guanosine-3'-phosphate
  modified_base 18: mod_base = OTHER; note = 2'-O-methylcytidine-3'-phosphate
  modified_base 19: mod_base = OTHER; note = 2'-O-methyluridine-3'-phosphate
  modified_base 20: mod_base = OTHER; note = 2'-deoxythymidine-3'-phosphorothioate
  misc_feature 1..19: note = RNA
  misc_feature 20..21: note = DNA
ctgccgggcccacaacgcttt

SEQ ID NO: 636 - DNA, 21 bp, synthetic construct
  source 1..21: mol_type = other DNA
  modified_base 1: mod_base = OTHER; note = adenosine-3'-phosphate
  modified_base 2: mod_base = OTHER; note = guanosine-3'-phosphate
  modified_base 3: mod_base = OTHER; note = cytidine-3'-phosphate
  modified_base 4: mod_base = OTHER; note = guanosine-3'-phosphate
  modified_base 5: mod_base = OTHER; note = uridine-3'-phosphate
  modified_base 6: mod_base = OTHER; note = uridine-3'-phosphate
  modified_base 7: mod_base = OTHER; note = guanosine-3'-phosphate
  modified_base 8: mod_base = OTHER; note = uridine-3'-phosphate
  modified_base 9: mod_base = OTHER; note = guanosine-3'-phosphate
  modified_base 10: mod_base = OTHER; note = guanosine-3'-phosphate
  modified_base 11: mod_base = OTHER; note = guanosine-3'-phosphate
  modified_base 12: mod_base = OTHER; note = cytidine-3'-phosphate
  modified_base 13: mod_base = OTHER; note = cytidine-3'-phosphate
  modified_base 14: mod_base = OTHER; note = cytidine-3'-phosphate
  modified_base 15: mod_base = OTHER; note = guanosine-3'-phosphate
  modified_base 16: mod_base = OTHER; note = guanosine-3'-phosphate
  modified_base 17: mod_base = OTHER; note = 2'-O-methylcytidine-3'-phosphate
  modified_base 18: mod_base = OTHER; note = adenosine-3'-phosphate
  modified_base 19: mod_base = OTHER; note = guanosine-3'-phosphate
  modified_base 20: mod_base = OTHER; note = 2'-deoxythymidine-3'-phosphorothioate
  misc_feature 1..19: note = RNA
  misc_feature 20..21: note = DNA
agcgttgtgggcccggcagtt

SEQ ID NO: 637 - DNA, 21 bp, synthetic construct
  source 1..21: mol_type = other DNA
  modified_base 1: mod_base = OTHER; note = uridine-3'-phosphate
  modified_base 2: mod_base = OTHER; note = guanosine-3'-phosphate
  modified_base 3: mod_base = OTHER; note = cytidine-3'-phosphate
  modified_base 4: mod_base = OTHER; note = cytidine-3'-phosphate
  modified_base 5: mod_base = OTHER; note = guanosine-3'-phosphate
  modified_base 6: mod_base = OTHER; note = guanosine-3'-phosphate
  modified_base 7: mod_base = OTHER; note = guanosine-3'-phosphate
  modified_base 8: mod_base = OTHER; note = cytidine-3'-phosphate
  modified_base 9: mod_base = OTHER; note = cytidine-3'-phosphate
  modified_base 10: mod_base = OTHER; note = cytidine-3'-phosphate
  modified_base 11: mod_base = OTHER; note = adenosine-3'-phosphate
  modified_base 12: mod_base = OTHER; note = cytidine-3'-phosphate
  modified_base 13: mod_base = OTHER; note = adenosine-3'-phosphate
  modified_base 14: mod_base = OTHER; note = adenosine-3'-phosphate
  modified_base 15: mod_base = OTHER; note = cytidine-3'-phosphate
  modified_base 16: mod_base = OTHER; note = guanosine-3'-phosphate
  modified_base 17: mod_base = OTHER; note = cytidine-3'-phosphate
  modified_base 18: mod_base = OTHER; note = uridine-3'-phosphate
  modified_base 19: mod_base = OTHER; note = uridine-3'-phosphate
  modified_base 20: mod_base = OTHER; note = 2'-deoxythymidine-3'-phosphorothioate
  misc_feature 1..19: note = RNA
  misc_feature 20..21: note = DNA
tgccgggcccacaacgctttt

SEQ ID NO: 638 - DNA, 21 bp, synthetic construct
  source 1..21: mol_type = other DNA
  modified_base 1: mod_base = OTHER; note = adenosine-3'-phosphate
  modified_base 2: mod_base = OTHER; note = adenosine-3'-phosphate
  modified_base 3: mod_base = OTHER; note = guanosine-3'-phosphate
  modified_base 4: mod_base = OTHER; note = cytidine-3'-phosphate
  modified_base 5: mod_base = OTHER; note = guanosine-3'-phosphate
  modified_base 6: mod_base = OTHER; note = uridine-3'-phosphate
  modified_base 7: mod_base = OTHER; note = uridine-3'-phosphate
  modified_base 8: mod_base = OTHER; note = guanosine-3'-phosphate
  modified_base 9: mod_base = OTHER; note = uridine-3'-phosphate
  modified_base 10: mod_base = OTHER; note = guanosine-3'-phosphate
  modified_base 11: mod_base = OTHER; note = guanosine-3'-phosphate
  modified_base 12: mod_base = OTHER; note = guanosine-3'-phosphate
  modified_base 13: mod_base = OTHER; note = cytidine-3'-phosphate
  modified_base 14: mod_base = OTHER; note = cytidine-3'-phosphate
  modified_base 15: mod_base = OTHER; note = cytidine-3'-phosphate
  modified_base 16: mod_base = OTHER; note = guanosine-3'-phosphate
  modified_base 17: mod_base = OTHER; note = guanosine-3'-phosphate
  modified_base 18: mod_base = OTHER; note = cytidine-3'-phosphate
  modified_base 19: mod_base = OTHER; note = adenosine-3'-phosphate
  modified_base 20: mod_base = OTHER; note = 2'-deoxythymidine-3'-phosphorothioate
  misc_feature 1..19: note = RNA
  misc_feature 20..21: note = DNA
aagcgttgtgggcccggcatt

SEQ ID NO: 639 - DNA, 21 bp, synthetic construct
  source 1..21: mol_type = other DNA
  modified_base 1: mod_base = OTHER; note = 2'-O-methyluridine-3'-phosphate
  modified_base 2: mod_base = OTHER; note = guanosine-3'-phosphate
  modified_base 3: mod_base = OTHER; note = 2'-O-methylcytidine-3'-phosphate
  modified_base 4: mod_base = OTHER; note = 2'-O-methylcytidine-3'-phosphate
  modified_base 5: mod_base = OTHER; note = guanosine-3'-phosphate
  modified_base 6: mod_base = OTHER; note = guanosine-3'-phosphate
  modified_base 7: mod_base = OTHER; note = guanosine-3'-phosphate
  modified_base 8: mod_base = OTHER; note = 2'-O-methylcytidine-3'-phosphate
  modified_base 9: mod_base = OTHER; note = 2'-O-methylcytidine-3'-phosphate
  modified_base 10: mod_base = OTHER; note = 2'-O-methylcytidine-3'-phosphate
  modified_base 11: mod_base = OTHER; note = adenosine-3'-phosphate
  modified_base 12: mod_base = OTHER; note = 2'-O-methylcytidine-3'-phosphate
  modified_base 13: mod_base = OTHER; note = adenosine-3'-phosphate
  modified_base 14: mod_base = OTHER; note = adenosine-3'-phosphate
  modified_base 15: mod_base = OTHER; note = 2'-O-methylcytidine-3'-phosphate
  modified_base 16: mod_base = OTHER; note = guanosine-3'-phosphate
  modified_base 17: mod_base = OTHER; note = 2'-O-methylcytidine-3'-phosphate
  modified_base 18: mod_base = OTHER; note = 2'-O-methyluridine-3'-phosphate
  modified_base 19: mod_base = OTHER; note = 2'-O-methyluridine-3'-phosphate
  modified_base 20: mod_base = OTHER; note = 2'-deoxythymidine-3'-phosphorothioate
  misc_feature 1..19: note = RNA
  misc_feature 20..21: note = DNA
tgccgggcccacaacgctttt

SEQ ID NO: 640 - DNA, 21 bp, synthetic construct
  source 1..21: mol_type = other DNA
  modified_base 1: mod_base = OTHER; note = adenosine-3'-phosphate
  modified_base 2: mod_base = OTHER; note = adenosine-3'-phosphate
  modified_base 3: mod_base = OTHER; note = guanosine-3'-phosphate
  modified_base 4: mod_base = OTHER; note = cytidine-3'-phosphate
  modified_base 5: mod_base = OTHER; note = guanosine-3'-phosphate
  modified_base 6: mod_base = OTHER; note = uridine-3'-phosphate
  modified_base 7: mod_base = OTHER; note = uridine-3'-phosphate
  modified_base 8: mod_base = OTHER; note = guanosine-3'-phosphate
  modified_base 9: mod_base = OTHER; note = uridine-3'-phosphate
  modified_base 10: mod_base = OTHER; note = guanosine-3'-phosphate
  modified_base 11: mod_base = OTHER; note = guanosine-3'-phosphate
  modified_base 12: mod_base = OTHER; note = guanosine-3'-phosphate
  modified_base 13: mod_base = OTHER; note = cytidine-3'-phosphate
  modified_base 14: mod_base = OTHER; note = cytidine-3'-phosphate
  modified_base 15: mod_base = OTHER; note = cytidine-3'-phosphate
  modified_base 16: mod_base = OTHER; note = guanosine-3'-phosphate
  modified_base 17: mod_base = OTHER; note = guanosine-3'-phosphate
  modified_base 18: mod_base = OTHER; note = 2'-O-methylcytidine-3'-phosphate
  modified_base 19: mod_base = OTHER; note = adenosine-3'-phosphate
  modified_base 20: mod_base = OTHER; note = 2'-deoxythymidine-3'-phosphorothioate
  misc_feature 1..19: note = RNA
  misc_feature 20..21: note = DNA
aagcgttgtgggcccggcatt

SEQ ID NO: 641 - DNA, 21 bp, synthetic construct
  source 1..21: mol_type = other DNA
  modified_base 1: mod_base = OTHER; note = cytidine-3'-phosphate
  modified_base 2: mod_base = OTHER; note = cytidine-3'-phosphate
  modified_base 3: mod_base = OTHER; note = guanosine-3'-phosphate
  modified_base 4: mod_base = OTHER; note = guanosine-3'-phosphate
  modified_base 5: mod_base = OTHER; note = guanosine-3'-phosphate
  modified_base 6: mod_base = OTHER; note = cytidine-3'-phosphate
  modified_base 7: mod_base = OTHER; note = cytidine-3'-phosphate
  modified_base 8: mod_base = OTHER; note = cytidine-3'-phosphate
  modified_base 9: mod_base = OTHER; note = adenosine-3'-phosphate
  modified_base 10: mod_base = OTHER; note = cytidine-3'-phosphate
  modified_base 11: mod_base = OTHER; note = adenosine-3'-phosphate
  modified_base 12: mod_base = OTHER; note = adenosine-3'-phosphate
  modified_base 13: mod_base = OTHER; note = cytidine-3'-phosphate
  modified_base 14: mod_base = OTHER; note = guanosine-3'-phosphate
  modified_base 15: mod_base = OTHER; note = cytidine-3'-phosphate
  modified_base 16: mod_base = OTHER; note = uridine-3'-phosphate
  modified_base 17: mod_base = OTHER; note = uridine-3'-phosphate
  modified_base 18: mod_base = OTHER; note = uridine-3'-phosphate
  modified_base 19: mod_base = OTHER; note = uridine-3'-phosphate
  modified_base 20: mod_base = OTHER; note = 2'-deoxythymidine-3'-phosphorothioate
  misc_feature 1..19: note = RNA
  misc_feature 20..21: note = DNA
ccgggcccacaacgctttttt

SEQ ID NO: 642 - DNA, 21 bp, synthetic construct
  source 1..21: mol_type = other DNA
  modified_base 1: mod_base = OTHER; note = adenosine-3'-phosphate
  modified_base 2: mod_base = OTHER; note = adenosine-3'-phosphate
  modified_base 3: mod_base = OTHER; note = adenosine-3'-phosphate
  modified_base 4: mod_base = OTHER; note = adenosine-3'-phosphate
  modified_base 5: mod_base = OTHER; note = guanosine-3'-phosphate
  modified_base 6: mod_base = OTHER; note = cytidine-3'-phosphate
  modified_base 7: mod_base = OTHER; note = guanosine-3'-phosphate
  modified_base 8: mod_base = OTHER; note = uridine-3'-phosphate
  modified_base 9: mod_base = OTHER; note = uridine-3'-phosphate
  modified_base 10: mod_base = OTHER; note = guanosine-3'-phosphate
  modified_base 11: mod_base = OTHER; note = uridine-3'-phosphate
  modified_base 12: mod_base = OTHER; note = guanosine-3'-phosphate
  modified_base 13: mod_base = OTHER; note = guanosine-3'-phosphate
  modified_base 14: mod_base = OTHER; note = guanosine-3'-phosphate
  modified_base 15: mod_base = OTHER; note = cytidine-3'-phosphate
  modified_base 16: mod_base = OTHER; note = cytidine-3'-phosphate
  modified_base 17: mod_base = OTHER; note = cytidine-3'-phosphate
  modified_base 18: mod_base = OTHER; note = guanosine-3'-phosphate
  modified_base 19: mod_base = OTHER; note = guanosine-3'-phosphate
  modified_base 20: mod_base = OTHER; note = 2'-deoxythymidine-3'-phosphorothioate
  misc_feature 1..19: note = RNA
  misc_feature 20..21: note = DNA
aaaagcgttgtgggcccggtt

SEQ ID NO: 643 - DNA, 21 bp, synthetic construct
  source 1..21: mol_type = other DNA
  modified_base 1: mod_base = OTHER; note = 2'-O-methylcytidine-3'-phosphate
  modified_base 2: mod_base = OTHER; note = 2'-O-methylcytidine-3'-phosphate
  modified_base 3: mod_base = OTHER; note = guanosine-3'-phosphate
  modified_base 4: mod_base = OTHER; note = guanosine-3'-phosphate
  modified_base 5: mod_base = OTHER; note = guanosine-3'-phosphate
  modified_base 6: mod_base = OTHER; note = 2'-O-methylcytidine-3'-phosphate
  modified_base 7: mod_base = OTHER; note = 2'-O-methylcytidine-3'-phosphate
  modified_base 8: mod_base = OTHER; note = 2'-O-methylcytidine-3'-phosphate
  modified_base 9: mod_base = OTHER; note = adenosine-3'-phosphate
  modified_base 10: mod_base = OTHER; note = 2'-O-methylcytidine-3'-phosphate
  modified_base 11: mod_base = OTHER; note = adenosine-3'-phosphate
  modified_base 12: mod_base = OTHER; note = adenosine-3'-phosphate
  modified_base 13: mod_base = OTHER; note = 2'-O-methylcytidine-3'-phosphate
  modified_base 14: mod_base = OTHER; note = guanosine-3'-phosphate
  modified_base 15: mod_base = OTHER; note = 2'-O-methylcytidine-3'-phosphate
  modified_base 16: mod_base = OTHER; note = 2'-O-methyluridine-3'-phosphate
  modified_base 17: mod_base = OTHER; note = 2'-O-methyluridine-3'-phosphate
  modified_base 18: mod_base = OTHER; note = 2'-O-methyluridine-3'-phosphate
  modified_base 19: mod_base = OTHER; note = 2'-O-methyluridine-3'-phosphate
  modified_base 20: mod_base = OTHER; note = 2'-deoxythymidine-3'-phosphorothioate
  misc_feature 1..19: note = RNA
  misc_feature 20..21: note = DNA
ccgggcccacaacgctttttt

SEQ ID NO: 644 - DNA, 21 bp, synthetic construct
  source 1..21: mol_type = other DNA
  modified_base 1: mod_base = OTHER; note = adenosine-3'-phosphate
  modified_base 2: mod_base = OTHER; note = adenosine-3'-phosphate
  modified_base 3: mod_base = OTHER; note = adenosine-3'-phosphate
  modified_base 4: mod_base = OTHER; note = adenosine-3'-phosphate
  modified_base 5: mod_base = OTHER; note = guanosine-3'-phosphate
  modified_base 6: mod_base = OTHER; note = cytidine-3'-phosphate
  modified_base 7: mod_base = OTHER; note = guanosine-3'-phosphate
  modified_base 8: mod_base = OTHER; note = uridine-3'-phosphate
  modified_base 9: mod_base = OTHER; note = uridine-3'-phosphate
  modified_base 10: mod_base = OTHER; note = guanosine-3'-phosphate
  modified_base 11: mod_base = OTHER; note = uridine-3'-phosphate
  modified_base 12: mod_base = OTHER; note = guanosine-3'-phosphate
  modified_base 13: mod_base = OTHER; note = guanosine-3'-phosphate
  modified_base 14: mod_base = OTHER; note = guanosine-3'-phosphate
  modified_base 15: mod_base = OTHER; note = cytidine-3'-phosphate
  modified_base 16: mod_base = OTHER; note = cytidine-3'-phosphate
  modified_base 17: mod_base = OTHER; note = cytidine-3'-phosphate
  modified_base 18: mod_base = OTHER; note = guanosine-3'-phosphate
  modified_base 19: mod_base = OTHER; note = guanosine-3'-phosphate
  modified_base 20: mod_base = OTHER; note = 2'-deoxythymidine-3'-phosphorothioate
  misc_feature 1..19: note = RNA
  misc_feature 20..21: note = DNA
aaaagcgttgtgggcccggtt

SEQ ID NO: 645 - DNA, 21 bp, synthetic construct
  source 1..21: mol_type = other DNA
  modified_base 1: mod_base = OTHER; note = guanosine-3'-phosphate
  modified_base 2: mod_base = OTHER; note = guanosine-3'-phosphate
  modified_base 3: mod_base = OTHER; note = guanosine-3'-phosphate
  modified_base 4: mod_base = OTHER; note = cytidine-3'-phosphate
  modified_base 5: mod_base = OTHER; note = cytidine-3'-phosphate
  modified_base 6: mod_base = OTHER; note = cytidine-3'-phosphate
  modified_base 7: mod_base = OTHER; note = adenosine-3'-phosphate
  modified_base 8: mod_base = OTHER; note = cytidine-3'-phosphate
  modified_base 9: mod_base = OTHER; note = adenosine-3'-phosphate
  modified_base 10: mod_base = OTHER; note = adenosine-3'-phosphate
  modified_base 11: mod_base = OTHER; note = cytidine-3'-phosphate
  modified_base 12: mod_base = OTHER; note = guanosine-3'-phosphate
  modified_base 13: mod_base = OTHER; note = cytidine-3'-phosphate
  modified_base 14: mod_base = OTHER; note = uridine-3'-phosphate
  modified_base 15: mod_base = OTHER; note = uridine-3'-phosphate
  modified_base 16: mod_base = OTHER; note = uridine-3'-phosphate
  modified_base 17: mod_base = OTHER; note = uridine-3'-phosphate
  modified_base 18: mod_base = OTHER; note = guanosine-3'-phosphate
  modified_base 19: mod_base = OTHER; note = guanosine-3'-phosphate
  modified_base 20: mod_base = OTHER; note = 2'-deoxythymidine-3'-phosphorothioate
  misc_feature 1..19: note = RNA
  misc_feature 20..21: note = DNA
gggcccacaacgcttttggtt

SEQ ID NO: 646 - DNA, 21 bp, synthetic construct
  source 1..21: mol_type = other DNA
  modified_base 1: mod_base = OTHER; note = cytidine-3'-phosphate
  modified_base 2: mod_base = OTHER; note = cytidine-3'-phosphate
  modified_base 3: mod_base = OTHER; note = adenosine-3'-phosphate
  modified_base 4: mod_base = OTHER; note = adenosine-3'-phosphate
  modified_base 5: mod_base = OTHER; note = adenosine-3'-phosphate
  modified_base 6: mod_base = OTHER; note = adenosine-3'-phosphate
  modified_base 7: mod_base = OTHER; note = guanosine-3'-phosphate
  modified_base 8: mod_base = OTHER; note = cytidine-3'-phosphate
  modified_base 9: mod_base = OTHER; note = guanosine-3'-phosphate
  modified_base 10: mod_base = OTHER; note = uridine-3'-phosphate
  modified_base 11: mod_base = OTHER; note = uridine-3'-phosphate
  modified_base 12: mod_base = OTHER; note = guanosine-3'-phosphate
  modified_base 13: mod_base = OTHER; note = uridine-3'-phosphate
  modified_base 14: mod_base = OTHER; note = guanosine-3'-phosphate
  modified_base 15: mod_base = OTHER; note = guanosine-3'-phosphate
  modified_base 16: mod_base = OTHER; note = guanosine-3'-phosphate
  modified_base 17: mod_base = OTHER; note = cytidine-3'-phosphate
  modified_base 18: mod_base = OTHER; note = cytidine-3'-phosphate
  modified_base 19: mod_base = OTHER; note = cytidine-3'-phosphate
  modified_base 20: mod_base = OTHER; note = 2'-deoxythymidine-3'-phosphorothioate
  misc_feature 1..19: note = RNA
  misc_feature 20..21: note = DNA
ccaaaagcgttgtgggccctt

SEQ ID NO: 647 - DNA, 21 bp, synthetic construct
  source 1..21: mol_type = other DNA
  modified_base 1: mod_base = OTHER; note = guanosine-3'-phosphate
  modified_base 2: mod_base = OTHER; note = guanosine-3'-phosphate
  modified_base 3: mod_base = OTHER; note = guanosine-3'-phosphate
  modified_base 4: mod_base = OTHER; note = 2'-O-methylcytidine-3'-phosphate
  modified_base 5: mod_base = OTHER; note = 2'-O-methylcytidine-3'-phosphate
  modified_base 6: mod_base = OTHER; note = 2'-O-methylcytidine-3'-phosphate
  modified_base 7: mod_base = OTHER; note = adenosine-3'-phosphate
  modified_base 8: mod_base = OTHER; note = 2'-O-methylcytidine-3'-phosphate
  modified_base 9: mod_base = OTHER; note = adenosine-3'-phosphate
  modified_base 10: mod_base = OTHER; note = adenosine-3'-phosphate
  modified_base 11: mod_base = OTHER; note = 2'-O-methylcytidine-3'-phosphate
  modified_base 12: mod_base = OTHER; note = guanosine-3'-phosphate
  modified_base 13: mod_base = OTHER; note = 2'-O-methylcytidine-3'-phosphate
  modified_base 14: mod_base = OTHER; note = 2'-O-methyluridine-3'-phosphate
  modified_base 15: mod_base = OTHER; note = 2'-O-methyluridine-3'-phosphate
  modified_base 16: mod_base = OTHER; note = 2'-O-methyluridine-3'-phosphate
  modified_base 17: mod_base = OTHER; note = 2'-O-methyluridine-3'-phosphate
  modified_base 18: mod_base = OTHER; note = guanosine-3'-phosphate
  modified_base 19: mod_base = OTHER; note = guanosine-3'-phosphate
  modified_base 20: mod_base = OTHER; note = 2'-deoxythymidine-3'-phosphorothioate
  misc_feature 1..19: note = RNA
  misc_feature 20..21: note = DNA
gggcccacaacgcttttggtt

SEQ ID NO: 648 - DNA, 21 bp, synthetic construct
  source 1..21: mol_type = other DNA
  modified_base 1: mod_base = OTHER; note = cytidine-3'-phosphate
  modified_base 2: mod_base = OTHER; note = 2'-O-methylcytidine-3'-phosphate
  modified_base 3: mod_base = OTHER; note = adenosine-3'-phosphate
  modified_base 4: mod_base = OTHER; note = adenosine-3'-phosphate
  modified_base 5: mod_base = OTHER; note = adenosine-3'-phosphate
  modified_base 6: mod_base = OTHER; note = adenosine-3'-phosphate
  modified_base 7: mod_base = OTHER; note = guanosine-3'-phosphate
  modified_base 8: mod_base = OTHER; note = cytidine-3'-phosphate
  modified_base 9: mod_base = OTHER; note = guanosine-3'-phosphate
  modified_base 10: mod_base = OTHER; note = uridine-3'-phosphate
  modified_base 11: mod_base = OTHER; note = uridine-3'-phosphate
  modified_base 12: mod_base = OTHER; note = guanosine-3'-phosphate
  modified_base 13: mod_base = OTHER; note = uridine-3'-phosphate
  modified_base 14: mod_base = OTHER; note = guanosine-3'-phosphate
  modified_base 15: mod_base = OTHER; note = guanosine-3'-phosphate
  modified_base 16: mod_base = OTHER; note = guanosine-3'-phosphate
  modified_base 17: mod_base = OTHER; note = cytidine-3'-phosphate
  modified_base 18: mod_base = OTHER; note = cytidine-3'-phosphate
  modified_base 19: mod_base = OTHER; note = cytidine-3'-phosphate
  modified_base 20: mod_base = OTHER; note = 2'-deoxythymidine-3'-phosphorothioate
  misc_feature 1..19: note = RNA
  misc_feature 20..21: note = DNA
ccaaaagcgttgtgggccctt

SEQ ID NO: 649 - DNA, 21 bp, synthetic construct
  source 1..21: mol_type = other DNA
  modified_base 1: mod_base = OTHER; note = guanosine-3'-phosphate
  modified_base 2: mod_base = OTHER; note = guanosine-3'-phosphate
  modified_base 3: mod_base = OTHER; note = uridine-3'-phosphate
  modified_base 4: mod_base = OTHER; note = guanosine-3'-phosphate
  modified_base 5: mod_base = OTHER; note = adenosine-3'-phosphate
  modified_base 6: mod_base = OTHER; note = guanosine-3'-phosphate
  modified_base 7: mod_base = OTHER; note = guanosine-3'-phosphate
  modified_base 8: mod_base = OTHER; note = guanosine-3'-phosphate
  modified_base 9: mod_base = OTHER; note = uridine-3'-phosphate
  modified_base 10: mod_base = OTHER; note = guanosine-3'-phosphate
  modified_base 11: mod_base = OTHER; note = uridine-3'-phosphate
  modified_base 12: mod_base = OTHER; note = cytidine-3'-phosphate
  modified_base 13: mod_base = OTHER; note = uridine-3'-phosphate
  modified_base 14: mod_base = OTHER; note = adenosine-3'-phosphate
  modified_base 15: mod_base = OTHER; note = cytidine-3'-phosphate
  modified_base 16: mod_base = OTHER; note = guanosine-3'-phosphate
  modified_base 17: mod_base = OTHER; note = cytidine-3'-phosphate
  modified_base 18: mod_base = OTHER; note = cytidine-3'-phosphate
  modified_base 19: mod_base = OTHER; note = adenosine-3'-phosphate
  modified_base 20: mod_base = OTHER; note = 2'-deoxythymidine-3'-phosphorothioate
  misc_feature 1..19: note = RNA
  misc_feature 20..21: note = DNA
ggtgagggtgtctacgccatt

SEQ ID NO: 650 - DNA, 21 bp, synthetic construct
  source 1..21: mol_type = other DNA
  modified_base 1: mod_base = OTHER; note = uridine-3'-phosphate
  modified_base 2: mod_base = OTHER; note = guanosine-3'-phosphate
  modified_base 3: mod_base = OTHER; note = guanosine-3'-phosphate
  modified_base 4: mod_base = OTHER; note = cytidine-3'-phosphate
  modified_base 5: mod_base = OTHER; note = guanosine-3'-phosphate
  modified_base 6: mod_base = OTHER; note = uridine-3'-phosphate
  modified_base 7: mod_base = OTHER; note = adenosine-3'-phosphate
  modified_base 8: mod_base = OTHER; note = guanosine-3'-phosphate
  modified_base 9: mod_base = OTHER; note = adenosine-3'-phosphate
  modified_base 10: mod_base = OTHER; note = cytidine-3'-phosphate
  modified_base 11: mod_base = OTHER; note = adenosine-3'-phosphate
  modified_base 12: mod_base = OTHER; note = cytidine-3'-phosphate
  modified_base 13: mod_base = OTHER; note = cytidine-3'-phosphate
  modified_base 14: mod_base = OTHER; note = cytidine-3'-phosphate
  modified_base 15: mod_base = OTHER; note = uridine-3'-phosphate
  modified_base 16: mod_base = OTHER; note = cytidine-3'-phosphate
  modified_base 17: mod_base = OTHER; note = adenosine-3'-phosphate
  modified_base 18: mod_base = OTHER; note = cytidine-3'-phosphate
  modified_base 19: mod_base = OTHER; note = cytidine-3'-phosphate
  modified_base 20: mod_base = OTHER; note = 2'-deoxythymidine-3'-phosphorothioate
  misc_feature 1..19: note = RNA
  misc_feature 20..21: note = DNA
tggcgtagacaccctcacctt

SEQ ID NO: 651 - DNA, 21 bp, synthetic construct
  source 1..21: mol_type = other DNA
  modified_base 1: mod_base = OTHER; note = guanosine-3'-phosphate
  modified_base 2: mod_base = OTHER; note = guanosine-3'-phosphate
  modified_base 3: mod_base = OTHER; note = 2'-O-methyluridine-3'-phosphate
  modified_base 4: mod_base = OTHER; note = guanosine-3'-phosphate
  modified_base 5: mod_base = OTHER; note = adenosine-3'-phosphate
  modified_base 6: mod_base = OTHER; note = guanosine-3'-phosphate
  modified_base 7: mod_base = OTHER; note = guanosine-3'-phosphate
  modified_base 8: mod_base = OTHER; note = guanosine-3'-phosphate
  modified_base 9: mod_base = OTHER; note = 2'-O-methyluridine-3'-phosphate
  modified_base 10: mod_base = OTHER; note = guanosine-3'-phosphate
  modified_base 11: mod_base = OTHER; note = 2'-O-methyluridine-3'-phosphate
  modified_base 12: mod_base = OTHER; note = 2'-O-methylcytidine-3'-phosphate
  modified_base 13: mod_base = OTHER; note = 2'-O-methyluridine-3'-phosphate
  modified_base 14: mod_base = OTHER; note = adenosine-3'-phosphate
  modified_base 15: mod_base = OTHER; note = 2'-O-methylcytidine-3'-phosphate
  modified_base 16: mod_base = OTHER; note = guanosine-3'-phosphate
  modified_base 17: mod_base = OTHER; note = 2'-O-methylcytidine-3'-phosphate
  modified_base 18: mod_base = OTHER; note = 2'-O-methylcytidine-3'-phosphate
  modified_base 19: mod_base = OTHER; note = adenosine-3'-phosphate
  modified_base 20: mod_base = OTHER; note = 2'-deoxythymidine-3'-phosphorothioate
  misc_feature 1..19: note = RNA
  misc_feature 20..21: note = DNA
ggtgagggtgtctacgccatt

SEQ ID NO: 652 - DNA, 21 bp, synthetic construct
  source 1..21: mol_type = other DNA
  modified_base 1: mod_base = OTHER; note = uridine-3'-phosphate
  modified_base 2: mod_base = OTHER; note = guanosine-3'-phosphate
  modified_base 3: mod_base = OTHER; note = guanosine-3'-phosphate
  modified_base 4: mod_base = OTHER; note = cytidine-3'-phosphate
  modified_base 5: mod_base = OTHER; note = guanosine-3'-phosphate
  modified_base 6: mod_base = OTHER; note = 2'-O-methyluridine-3'-phosphate
  modified_base 7: mod_base = OTHER; note = adenosine-3'-phosphate
  modified_base 8: mod_base = OTHER; note = guanosine-3'-phosphate
  modified_base 9: mod_base = OTHER; note = adenosine-3'-phosphate
  modified_base 10: mod_base = OTHER; note = 2'-O-methylcytidine-3'-phosphate
  modified_base 11: mod_base = OTHER; note = adenosine-3'-phosphate
  modified_base 12: mod_base = OTHER; note = cytidine-3'-phosphate
  modified_base 13: mod_base = OTHER; note = cytidine-3'-phosphate
  modified_base 14: mod_base = OTHER; note = cytidine-3'-phosphate
  modified_base 15: mod_base = OTHER; note = uridine-3'-phosphate
  modified_base 16: mod_base = OTHER; note = 2'-O-methylcytidine-3'-phosphate
  modified_base 17: mod_base = OTHER; note = adenosine-3'-phosphate
  modified_base 18: mod_base = OTHER; note = cytidine-3'-phosphate
  modified_base 19: mod_base = OTHER; note = cytidine-3'-phosphate
  modified_base 20: mod_base = OTHER; note = 2'-deoxythymidine-3'-phosphorothioate
  misc_feature 1..19: note = RNA
  misc_feature 20..21: note = DNA
tggcgtagacaccctcacctt

SEQ ID NO: 653 - DNA, 21 bp, synthetic construct
  source 1..21: mol_type = other DNA
  modified_base 1: mod_base = OTHER; note = guanosine-3'-phosphate
  modified_base 2: mod_base = OTHER; note = adenosine-3'-phosphate
  modified_base 3: mod_base = OTHER; note = guanosine-3'-phosphate
  modified_base 4: mod_base = OTHER; note = guanosine-3'-phosphate
  modified_base 5: mod_base = OTHER; note = guanosine-3'-phosphate
  modified_base 6: mod_base = OTHER; note = uridine-3'-phosphate
  modified_base 7: mod_base = OTHER; note = guanosine-3'-phosphate
  modified_base 8: mod_base = OTHER; note = uridine-3'-phosphate
  modified_base 9: mod_base = OTHER; note = cytidine-3'-phosphate
  modified_base 10: mod_base = OTHER; note = uridine-3'-phosphate
  modified_base 11: mod_base = OTHER; note = adenosine-3'-phosphate
  modified_base 12: mod_base = OTHER; note = cytidine-3'-phosphate
  modified_base 13: mod_base = OTHER; note = guanosine-3'-phosphate
  modified_base 14: mod_base = OTHER; note = cytidine-3'-phosphate
  modified_base 15: mod_base = OTHER; note = cytidine-3'-phosphate
  modified_base 16: mod_base = OTHER; note = adenosine-3'-phosphate
  modified_base 17: mod_base = OTHER; note = uridine-3'-phosphate
  modified_base 18: mod_base = OTHER; note = uridine-3'-phosphate
  modified_base 19: mod_base = OTHER; note = guanosine-3'-phosphate
  modified_base 20: mod_base = OTHER; note = 2'-deoxythymidine-3'-phosphorothioate
  misc_feature 1..19: note = RNA
  misc_feature 20..21: note = DNA
gagggtgtctacgccattgtt

SEQ ID NO: 654 - DNA, 21 bp, synthetic construct
  source 1..21: mol_type = other DNA
  modified_base 1: mod_base = OTHER; note = cytidine-3'-phosphate
  modified_base 2: mod_base = OTHER; note = adenosine-3'-phosphate
  modified_base 3: mod_base = OTHER; note = adenosine-3'-phosphate
  modified_base 4: mod_base = OTHER; note = uridine-3'-phosphate
  modified_base 5: mod_base = OTHER; note = guanosine-3'-phosphate
  modified_base 6: mod_base = OTHER; note = guanosine-3'-phosphate
  modified_base 7: mod_base = OTHER; note = cytidine-3'-phosphate
  modified_base 8: mod_base = OTHER; note = guanosine-3'-phosphate
  modified_base 9: mod_base = OTHER; note = uridine-3'-phosphate
  modified_base 10: mod_base = OTHER; note = adenosine-3'-phosphate
  modified_base 11: mod_base = OTHER; note = guanosine-3'-phosphate
  modified_base 12: mod_base = OTHER; note = adenosine-3'-phosphate
  modified_base 13: mod_base = OTHER; note = cytidine-3'-phosphate
  modified_base 14: mod_base = OTHER; note = adenosine-3'-phosphate
  modified_base 15: mod_base = OTHER; note = cytidine-3'-phosphate
  modified_base 16: mod_base = OTHER; note = cytidine-3'-phosphate
  modified_base 17: mod_base = OTHER; note = cytidine-3'-phosphate
  modified_base 18: mod_base = OTHER; note = uridine-3'-phosphate
  modified_base 19: mod_base = OTHER; note = cytidine-3'-phosphate
  modified_base 20: mod_base = OTHER; note = 2'-deoxythymidine-3'-phosphorothioate
  misc_feature 1..19: note = RNA
  misc_feature 20..21: note = DNA
caatggcgtagacaccctctt

SEQ ID NO: 655 - DNA, 21 bp, synthetic construct
  source 1..21: mol_type = other DNA
  modified_base 1: mod_base = OTHER; note = guanosine-3'-phosphate
  modified_base 2: mod_base = OTHER; note = adenosine-3'-phosphate
  modified_base 3: mod_base = OTHER; note = guanosine-3'-phosphate
  modified_base 4: mod_base = OTHER; note = guanosine-3'-phosphate
  modified_base 5: mod_base = OTHER; note = guanosine-3'-phosphate
  modified_base 6: mod_base = OTHER; note = 2'-O-methyluridine-3'-phosphate
  modified_base 7: mod_base = OTHER; note = guanosine-3'-phosphate
  modified_base 8: mod_base = OTHER; note = 2'-O-methyluridine-3'-phosphate
  modified_base 9: mod_base = OTHER; note = 2'-O-methylcytidine-3'-phosphate
  modified_base 10: mod_base = OTHER; note = 2'-O-methyluridine-3'-phosphate
  modified_base 11: mod_base = OTHER; note = adenosine-3'-phosphate
  modified_base 12: mod_base = OTHER; note = 2'-O-methylcytidine-3'-phosphate
  modified_base 13: mod_base = OTHER; note = guanosine-3'-phosphate
  modified_base 14: mod_base = OTHER; note = 2'-O-methylcytidine-3'-phosphate
  modified_base 15: mod_base = OTHER; note = 2'-O-methylcytidine-3'-phosphate
  modified_base 16: mod_base = OTHER; note = adenosine-3'-phosphate
  modified_base 17: mod_base = OTHER; note = 2'-O-methyluridine-3'-phosphate
  modified_base 18: mod_base = OTHER; note = 2'-O-methyluridine-3'-phosphate
  modified_base 19: mod_base = OTHER; note = guanosine-3'-phosphate
  modified_base 20: mod_base = OTHER; note = 2'-deoxythymidine-3'-phosphorothioate
  misc_feature 1..19: note = RNA
  misc_feature 20..21: note = DNA
gagggtgtctacgccattgtt

SEQ ID NO: 656 - DNA, 21 bp, synthetic construct
  source 1..21: mol_type = other DNA
  modified_base 1: mod_base = OTHER; note = 2'-O-methylcytidine-3'-phosphate
  modified_base 2: mod_base = OTHER; note = adenosine-3'-phosphate
  modified_base 3: mod_base = OTHER; note = adenosine-3'-phosphate
  modified_base 4: mod_base = OTHER; note = uridine-3'-phosphate
  modified_base 5: mod_base = OTHER; note = guanosine-3'-phosphate
  modified_base 6: mod_base = OTHER; note = guanosine-3'-phosphate
  modified_base 7: mod_base = OTHER; note = cytidine-3'-phosphate
  modified_base 8: mod_base = OTHER; note = guanosine-3'-phosphate
  modified_base 9: mod_base = OTHER; note = 2'-O-methyluridine-3'-phosphate
  modified_base 10: mod_base = OTHER; note = adenosine-3'-phosphate
  modified_base 11: mod_base = OTHER; note = guanosine-3'-phosphate
  modified_base 12: mod_base = OTHER; note = adenosine-3'-phosphate
  modified_base 13: mod_base = OTHER; note = 2'-O-methylcytidine-3'-phosphate
  modified_base 14: mod_base = OTHER; note = adenosine-3'-phosphate
  modified_base 15: mod_base = OTHER; note = cytidine-3'-phosphate
  modified_base 16: mod_base = OTHER; note = cytidine-3'-phosphate
  modified_base 17: mod_base = OTHER; note = cytidine-3'-phosphate
  modified_base 18: mod_base = OTHER; note = uridine-3'-phosphate
  modified_base 19: mod_base = OTHER; note = cytidine-3'-phosphate
  modified_base 20: mod_base = OTHER; note = 2'-deoxythymidine-3'-phosphorothioate
  misc_feature 1..19: note = RNA
  misc_feature 20..21: note = DNA
caatggcgtagacaccctctt

SEQ ID NO: 657 - DNA, 21 bp, synthetic construct
  source 1..21: mol_type = other DNA
  modified_base 1: mod_base = OTHER; note = guanosine-3'-phosphate
  modified_base 2: mod_base = OTHER; note = cytidine-3'-phosphate
  modified_base 3: mod_base = OTHER; note = cytidine-3'-phosphate
  modified_base 4: mod_base = OTHER; note = adenosine-3'-phosphate
  modified_base 5: mod_base = OTHER; note = guanosine-3'-phosphate
  modified_base 6: mod_base = OTHER; note = guanosine-3'-phosphate
  modified_base 7: mod_base = OTHER; note = uridine-3'-phosphate
  modified_base 8: mod_base = OTHER; note = guanosine-3'-phosphate
  modified_base 9: mod_base = OTHER; note = cytidine-3'-phosphate
  modified_base 10: mod_base = OTHER; note = uridine-3'-phosphate
  modified_base 11: mod_base = OTHER; note = guanosine-3'-phosphate
  modified_base 12: mod_base = OTHER; note = cytidine-3'-phosphate
  modified_base 13: mod_base = OTHER; note = cytidine-3'-phosphate
  modified_base 14: mod_base = OTHER; note = uridine-3'-phosphate
  modified_base 15: mod_base = OTHER; note = guanosine-3'-phosphate
  modified_base 16: mod_base = OTHER; note = cytidine-3'-phosphate
  modified_base 17: mod_base = OTHER; note = uridine-3'-phosphate
  modified_base 18: mod_base = OTHER; note = adenosine-3'-phosphate
  modified_base 19: mod_base = OTHER; note = cytidine-3'-phosphate
  modified_base 20: mod_base = OTHER; note = 2'-deoxythymidine-3'-phosphorothioate
  misc_feature 1..19: note = RNA
  misc_feature 20..21: note = DNA
gccaggtgctgcctgctactt

SEQ ID NO: 658 - DNA, 21 bp, synthetic construct
  source 1..21: mol_type = other DNA
  modified_base 1: mod_base = OTHER; note = guanosine-3'-phosphate
  modified_base 2: mod_base = OTHER; note = uridine-3'-phosphate
  modified_base 3: mod_base = OTHER; note = adenosine-3'-phosphate
  modified_base 4: mod_base = OTHER; note = guanosine-3'-phosphate
  modified_base 5: mod_base = OTHER; note = cytidine-3'-phosphate
  modified_base 6: mod_base = OTHER; note = adenosine-3'-phosphate
  modified_base 7: mod_base = OTHER; note = guanosine-3'-phosphate
  modified_base 8: mod_base = OTHER; note = guanosine-3'-phosphate
  modified_base 9: mod_base = OTHER; note = cytidine-3'-phosphate
  modified_base 10: mod_base = OTHER; note = adenosine-3'-phosphate
  modified_base 11: mod_base = OTHER; note = guanosine-3'-phosphate
  modified_base 12: mod_base = OTHER; note = cytidine-3'-phosphate
  modified_base 13: mod_base = OTHER; note = adenosine-3'-phosphate
  modified_base 14: mod_base = OTHER; note = cytidine-3'-phosphate
  modified_base 15: mod_base = OTHER; note = cytidine-3'-phosphate
  modified_base 16: mod_base = OTHER; note = uridine-3'-phosphate
  modified_base 17: mod_base = OTHER; note = guanosine-3'-phosphate
  modified_base 18: mod_base = OTHER; note = guanosine-3'-phosphate
  modified_base 19: mod_base = OTHER; note = cytidine-3'-phosphate
  modified_base 20: mod_base = OTHER; note = 2'-deoxythymidine-3'-phosphorothioate
  misc_feature 1..19: note = RNA
  misc_feature 20..21: note = DNA
gtagcaggcagcacctggctt

SEQ ID NO: 659 - DNA, 21 bp, synthetic construct
  source 1..21: mol_type = other DNA
  modified_base 1: mod_base = OTHER; note = guanosine-3'-phosphate
  modified_base 2: mod_base = OTHER; note = 2'-O-methylcytidine-3'-phosphate
  modified_base 3: mod_base = OTHER; note = 2'-O-methylcytidine-3'-phosphate
  modified_base 4: mod_base = OTHER; note = adenosine-3'-phosphate
  modified_base 5: mod_base = OTHER; note = guanosine-3'-phosphate
  modified_base 6: mod_base = OTHER; note = guanosine-3'-phosphate
  modified_base 7: mod_base = OTHER; note = 2'-O-methyluridine-3'-phosphate
  modified_base 8: mod_base = OTHER; note = guanosine-3'-phosphate
  modified_base 9: mod_base = OTHER; note = 2'-O-methylcytidine-3'-phosphate
  modified_base 10: mod_base = OTHER; note = 2'-O-methyluridine-3'-phosphate
  modified_base 11: mod_base = OTHER; note = guanosine-3'-phosphate
  modified_base 12: mod_base = OTHER; note = 2'-O-methylcytidine-3'-phosphate
  modified_base 13: mod_base = OTHER; note = 2'-O-methylcytidine-3'-phosphate
  modified_base 14: mod_base = OTHER; note = 2'-O-methyluridine-3'-phosphate
  modified_base 15: mod_base = OTHER; note = guanosine-3'-phosphate
  modified_base 16: mod_base = OTHER; note = 2'-O-methylcytidine-3'-phosphate
  modified_base 17: mod_base = OTHER; note = 2'-O-methyluridine-3'-phosphate
  modified_base 18: mod_base = OTHER; note = adenosine-3'-phosphate
  modified_base 19: mod_base = OTHER; note = 2'-O-methylcytidine-3'-phosphate
  modified_base 20: mod_base = OTHER; note = 2'-deoxythymidine-3'-phosphorothioate
  misc_feature 1..19: note = RNA
  misc_feature 20..21: note = DNA
gccaggtgctgcctgctactt

SEQ ID NO: 660 - DNA, 21 bp, synthetic construct
  source 1..21: mol_type = other DNA
  modified_base 1: mod_base = OTHER; note = guanosine-3'-phosphate
  modified_base 2: mod_base = OTHER; note = 2'-O-methyluridine-3'-phosphate
  modified_base 3: mod_base = OTHER; note = adenosine-3'-phosphate
  modified_base 4: mod_base = OTHER; note = guanosine-3'-phosphate
  modified_base 5: mod_base = OTHER; note = 2'-O-methylcytidine-3'-phosphate
  modified_base 6: mod_base = OTHER; note = adenosine-3'-phosphate
  modified_base 7: mod_base = OTHER; note = guanosine-3'-phosphate
  modified_base 8: mod_base = OTHER; note = guanosine-3'-phosphate
  modified_base 9: mod_base = OTHER; note = 2'-O-methylcytidine-3'-phosphate
  modified_base 10: mod_base = OTHER; note = adenosine-3'-phosphate
  modified_base 11: mod_base = OTHER; note = guanosine-3'-phosphate
  modified_base 12: mod_base = OTHER; note = 2'-O-methylcytidine-3'-phosphate
  modified_base 13: mod_base = OTHER; note = adenosine-3'-phosphate
  modified_base 14: mod_base = OTHER; note = cytidine-3'-phosphate
  modified_base 15: mod_base = OTHER; note = cytidine-3'-phosphate
  modified_base 16: mod_base = OTHER; note = uridine-3'-phosphate
  modified_base 17: mod_base = OTHER; note = guanosine-3'-phosphate
  modified_base 18: mod_base = OTHER; note = guanosine-3'-phosphate
  modified_base 19: mod_base = OTHER; note = cytidine-3'-phosphate
  modified_base 20: mod_base = OTHER; note = 2'-deoxythymidine-3'-phosphorothioate
  misc_feature 1..19: note = RNA
  misc_feature 20..21: note = DNA
gtagcaggcagcacctggctt

SEQ ID NO: 661 - DNA, 21 bp, synthetic construct
  source 1..21: mol_type = other DNA
  modified_base 1: mod_base = OTHER; note = cytidine-3'-phosphate
  modified_base 2: mod_base = OTHER; note = cytidine-3'-phosphate
  modified_base 3: mod_base = OTHER; note = adenosine-3'-phosphate
  modified_base 4: mod_base = OTHER; note = guanosine-3'-phosphate
  modified_base 5: mod_base = OTHER; note = guanosine-3'-phosphate
  modified_base 6: mod_base = OTHER; note = uridine-3'-phosphate
  modified_base 7: mod_base = OTHER; note = guanosine-3'-phosphate
  modified_base 8: mod_base = OTHER; note = cytidine-3'-phosphate
  modified_base 9: mod_base = OTHER; note = uridine-3'-phosphate
  modified_base 10: mod_base = OTHER; note = guanosine-3'-phosphate
  modified_base 11: mod_base = OTHER; note = cytidine-3'-phosphate
  modified_base 12: mod_base = OTHER; note = cytidine-3'-phosphate
  modified_base 13: mod_base = OTHER; note = uridine-3'-phosphate
  modified_base 14: mod_base = OTHER; note = guanosine-3'-phosphate
  modified_base 15: mod_base = OTHER; note = cytidine-3'-phosphate
  modified_base 16: mod_base = OTHER; note = uridine-3'-phosphate
  modified_base 17: mod_base = OTHER; note = adenosine-3'-phosphate
  modified_base 18: mod_base = OTHER; note = cytidine-3'-phosphate
  modified_base 19: mod_base = OTHER; note = cytidine-3'-phosphate
  modified_base 20: mod_base = OTHER; note = 2'-deoxythymidine-3'-phosphorothioate
  misc_feature 1..19: note = RNA
  misc_feature 20..21: note = DNA
ccaggtgctgcctgctacctt

SEQ ID NO: 662 - DNA, 21 bp, synthetic construct
  source 1..21: mol_type = other DNA
  modified_base 1: mod_base = OTHER; note = guanosine-3'-phosphate
  modified_base 2: mod_base = OTHER; note = guanosine-3'-phosphate
  modified_base 3: mod_base = OTHER; note = uridine-3'-phosphate
  modified_base 4: mod_base = OTHER; note = adenosine-3'-phosphate
  modified_base 5: mod_base = OTHER; note = guanosine-3'-phosphate
  modified_base 6: mod_base = OTHER; note = cytidine-3'-phosphate
  modified_base 7: mod_base = OTHER; note = adenosine-3'-phosphate
  modified_base 8: mod_base = OTHER; note = guanosine-3'-phosphate
  modified_base 9: mod_base = OTHER; note = guanosine-3'-phosphate
  modified_base 10: mod_base = OTHER; note = cytidine-3'-phosphate
  modified_base 11: mod_base = OTHER; note = adenosine-3'-phosphate
  modified_base 12: mod_base = OTHER; note = guanosine-3'-phosphate
  modified_base 13: mod_base = OTHER; note = cytidine-3'-phosphate
  modified_base 14: mod_base = OTHER; note = adenosine-3'-phosphate
  modified_base 15: mod_base = OTHER; note = cytidine-3'-phosphate
  modified_base 16: mod_base = OTHER; note = cytidine-3'-phosphate
  modified_base 17: mod_base = OTHER; note = uridine-3'-phosphate
  modified_base 18: mod_base = OTHER; note = guanosine-3'-phosphate
  modified_base 19: mod_base = OTHER; note = guanosine-3'-phosphate
  modified_base 20: mod_base = OTHER; note = 2'-deoxythymidine-3'-phosphorothioate
  misc_feature 1..19: note = RNA
  misc_feature 20..21: note = DNA
ggtagcaggcagcacctggtt

SEQ ID NO: 663 - DNA, 21 bp, synthetic construct
  source 1..21: mol_type = other DNA
  modified_base 1: mod_base = OTHER; note = 2'-O-methylcytidine-3'-phosphate
  modified_base 2: mod_base = OTHER; note = 2'-O-methylcytidine-3'-phosphate
  modified_base 3: mod_base = OTHER; note = adenosine-3'-phosphate
  modified_base 4: mod_base = OTHER; note = guanosine-3'-phosphate
  modified_base 5: mod_base = OTHER; note = guanosine-3'-phosphate
  modified_base 6: mod_base = OTHER; note = 2'-O-methyluridine-3'-phosphate
  modified_base 7: mod_base = OTHER; note = guanosine-3'-phosphate
  modified_base 8: mod_base = OTHER; note = 2'-O-methylcytidine-3'-phosphate
  modified_base 9: mod_base = OTHER; note = 2'-O-methyluridine-3'-phosphate
  modified_base 10: mod_base = OTHER; note = guanosine-3'-phosphate
  modified_base 11: mod_base = OTHER; note = 2'-O-methylcytidine-3'-phosphate
  modified_base 12: mod_base = OTHER; note = 2'-O-methylcytidine-3'-phosphate
  modified_base 13: mod_base = OTHER; note = 2'-O-methyluridine-3'-phosphate
  modified_base 14: mod_base = OTHER; note = guanosine-3'-phosphate
  modified_base 15: mod_base = OTHER; note = 2'-O-methylcytidine-3'-phosphate
  modified_base 16: mod_base = OTHER; note = 2'-O-methyluridine-3'-phosphate
  modified_base 17: mod_base = OTHER; note = adenosine-3'-phosphate
  modified_base 18: mod_base = OTHER; note = 2'-O-methylcytidine-3'-phosphate
  modified_base 19: mod_base = OTHER; note = 2'-O-methylcytidine-3'-phosphate
  modified_base 20: mod_base = OTHER; note = 2'-deoxythymidine-3'-phosphorothioate
  misc_feature 1..19: note = RNA
  misc_feature 20..21: note = DNA
ccaggtgctgcctgctacctt

SEQ ID NO: 664 - DNA, 21 bp, synthetic construct
  source 1..21: mol_type = other DNA
  modified_base 1: mod_base = OTHER; note = guanosine-3'-phosphate
  modified_base 2: mod_base = OTHER; note = guanosine-3'-phosphate
  modified_base 3: mod_base = OTHER; note = 2'-O-methyluridine-3'-phosphate
  modified_base 4: mod_base = OTHER; note = adenosine-3'-phosphate
  modified_base 5: mod_base = OTHER; note = guanosine-3'-phosphate
  modified_base 6: mod_base = OTHER; note = 2'-O-methylcytidine-3'-phosphate
  modified_base 7: mod_base = OTHER; note = adenosine-3'-phosphate
  modified_base 8: mod_base = OTHER; note = guanosine-3'-phosphate
  modified_base 9: mod_base = OTHER; note = guanosine-3'-phosphate
  modified_base 10: mod_base = OTHER; note = 2'-O-methylcytidine-3'-phosphate
  modified_base 11: mod_base = OTHER; note = adenosine-3'-phosphate
  modified_base 12: mod_base = OTHER; note = guanosine-3'-phosphate
  modified_base 13: mod_base = OTHER; note = 2'-O-methylcytidine-3'-phosphate
  modified_base 14: mod_base = OTHER; note = adenosine-3'-phosphate
  modified_base 15: mod_base = OTHER; note = cytidine-3'-phosphate
  modified_base 16: mod_base = OTHER; note = cytidine-3'-phosphate
  modified_base 17: mod_base = OTHER; note = uridine-3'-phosphate
  modified_base 18: mod_base = OTHER; note = guanosine-3'-phosphate
  modified_base 19: mod_base = OTHER; note = guanosine-3'-phosphate
  modified_base 20: mod_base = OTHER; note = 2'-deoxythymidine-3'-phosphorothioate
  misc_feature 1..19: note = RNA
  misc_feature 20..21: note = DNA
ggtagcaggcagcacctggtt

SEQ ID NO: 665 - DNA, 21 bp, synthetic construct
  source 1..21: mol_type = other DNA
  modified_base 1: mod_base = OTHER; note = adenosine-3'-phosphate
  modified_base 2: mod_base = OTHER; note = cytidine-3'-phosphate
  modified_base 3: mod_base = OTHER; note = cytidine-3'-phosphate
  modified_base 4: mod_base = OTHER; note = cytidine-3'-phosphate
  modified_base 5: mod_base = OTHER; note = adenosine-3'-phosphate
  modified_base 6: mod_base = OTHER; note = cytidine-3'-phosphate
  modified_base 7: mod_base = OTHER; note = adenosine-3'-phosphate
  modified_base 8: mod_base = OTHER; note = adenosine-3'-phosphate
  modified_base 9: mod_base = OTHER; note = guanosine-3'-phosphate
  modified_base 10: mod_base = OTHER; note = cytidine-3'-phosphate
  modified_base 11: mod_base = OTHER; note = cytidine-3'-phosphate
  modified_base 12: mod_base = OTHER; note = guanosine-3'-phosphate
  modified_base 13: mod_base = OTHER; note = cytidine-3'-phosphate
  modified_base 14: mod_base = OTHER; note = cytidine-3'-phosphate
  modified_base 15: mod_base = OTHER; note = uridine-3'-phosphate
  modified_base 16: mod_base = OTHER; note = guanosine-3'-phosphate
  modified_base 17: mod_base = OTHER; note = uridine-3'-phosphate
  modified_base 18: mod_base = OTHER; note = guanosine-3'-phosphate
  modified_base 19: mod_base = OTHER; note = cytidine-3'-phosphate
  misc_feature 1..19: note = RNA
  misc_feature 20..21: note = DNA
acccacaagccgcctgtgctt

SEQ ID NO: 666 - DNA, 21 bp, synthetic construct
  source 1..21: mol_type = other DNA
  modified_base 1: mod_base = OTHER; note = guanosine-3'-phosphate
  modified_base 2: mod_base = OTHER; note = cytidine-3'-phosphate
  modified_base 3: mod_base = OTHER; note = adenosine-3'-phosphate
  modified_base 4: mod_base = OTHER; note = cytidine-3'-phosphate
  modified_base 5: mod_base = OTHER; note = adenosine-3'-phosphate
  modified_base 6: mod_base = OTHER; note = guanosine-3'-phosphate
  modified_base 7: mod_base = OTHER; note = guanosine-3'-phosphate
  modified_base 8: mod_base = OTHER; note = cytidine-3'-phosphate
  modified_base 9: mod_base = OTHER; note = guanosine-3'-phosphate
  modified_base 10: mod_base = OTHER; note = guanosine-3'-phosphate
  modified_base 11: mod_base = OTHER; note = cytidine-3'-phosphate
  modified_base 12: mod_base = OTHER; note = uridine-3'-phosphate
  modified_base 13: mod_base = OTHER; note = uridine-3'-phosphate
  modified_base 14: mod_base = OTHER; note = guanosine-3'-phosphate
  modified_base 15: mod_base = OTHER; note = uridine-3'-phosphate
  modified_base 16: mod_base = OTHER; note = guanosine-3'-phosphate
  modified_base 17: mod_base = OTHER; note = guanosine-3'-phosphate
  modified_base 18: mod_base = OTHER; note = guanosine-3'-phosphate
  modified_base 19: mod_base = OTHER; note = uridine-3'-phosphate
  misc_feature 1..19: note = RNA
  misc_feature 20..21: note = DNA
gcacaggcggcttgtgggttt

SEQ ID NO: 667 - DNA, 21 bp, synthetic construct
  source 1..21: mol_type = other DNA
  modified_base 1: mod_base = OTHER; note = guanosine-3'-phosphate
  modified_base 2: mod_base = OTHER; note = uridine-3'-phosphate
  modified_base 3: mod_base = OTHER; note = guanosine-3'-phosphate
  modified_base 4: mod_base = OTHER; note = cytidine-3'-phosphate
  modified_base 5: mod_base = OTHER; note = uridine-3'-phosphate
  modified_base 6: mod_base = OTHER; note = guanosine-3'-phosphate
  modified_base 7: mod_base = OTHER; note = adenosine-3'-phosphate
  modified_base 8: mod_base = OTHER; note = guanosine-3'-phosphate
  modified_base 9: mod_base = OTHER; note = guanosine-3'-phosphate
  modified_base 10: mod_base = OTHER; note = cytidine-3'-phosphate
  modified_base 11: mod_base = OTHER; note = cytidine-3'-phosphate
  modified_base 12: mod_base = OTHER; note = adenosine-3'-phosphate
  modified_base 13: mod_base = OTHER; note = cytidine-3'-phosphate
  modified_base 14: mod_base = OTHER; note = guanosine-3'-phosphate
  modified_base 15: mod_base = OTHER; note = adenosine-3'-phosphate
  modified_base 16: mod_base = OTHER; note = guanosine-3'-phosphate
  modified_base 17: mod_base = OTHER; note = guanosine-3'-phosphate
  modified_base 18: mod_base = OTHER; note = uridine-3'-phosphate
  modified_base 19: mod_base = OTHER; note = cytidine-3'-phosphate
  modified_base 20: mod_base = OTHER; note = 2'-deoxythymidine-3'-phosphorothioate
  misc_feature 1..19: note = RNA
  misc_feature 20..21: note = DNA
gtgctgaggccacgaggtctt

SEQ ID NO: 668 - DNA, 21 bp, synthetic construct
  source 1..21: mol_type = other DNA
  modified_base 1: mod_base = OTHER; note = guanosine-3'-phosphate
  modified_base 2: mod_base = OTHER; note = adenosine-3'-phosphate
  modified_base 3: mod_base = OTHER; note = cytidine-3'-phosphate
  modified_base 4: mod_base = OTHER; note = cytidine-3'-phosphate
  modified_base 5: mod_base = OTHER; note = uridine-3'-phosphate
  modified_base 6: mod_base = OTHER; note = cytidine-3'-phosphate
  modified_base 7: mod_base = OTHER; note = guanosine-3'-phosphate
  modified_base 8: mod_base = OTHER; note = uridine-3'-phosphate
  modified_base 9: mod_base = OTHER; note = guanosine-3'-phosphate
  modified_base 10: mod_base = OTHER; note = guanosine-3'-phosphate
  modified_base 11: mod_base = OTHER; note = cytidine-3'-phosphate
  modified_base 12: mod_base = OTHER; note = cytidine-3'-phosphate
  modified_base 13: mod_base = OTHER; note = uridine-3'-phosphate
  modified_base 14: mod_base = OTHER; note = cytidine-3'-phosphate
  modified_base 15: mod_base = OTHER; note = adenosine-3'-phosphate
  modified_base 16: mod_base = OTHER; note = guanosine-3'-phosphate
  modified_base 17: mod_base = OTHER; note = cytidine-3'-phosphate
  modified_base 18: mod_base = OTHER; note = adenosine-3'-phosphate
  modified_base 19: mod_base = OTHER; note = cytidine-3'-phosphate
  modified_base 20: mod_base = OTHER; note = 2'-deoxythymidine-3'-phosphorothioate
  misc_feature 1..19: note = RNA
  misc_feature 20..21: note = DNA
gacctcgtggcctcagcactt

SEQ ID NO: 669 - DNA, 21 bp, synthetic construct
  source 1..21: mol_type = other DNA
  modified_base 1: mod_base = OTHER; note = guanosine-3'-phosphate
  modified_base 2: mod_base = OTHER; note = 2'-O-methyluridine-3'-phosphate
  modified_base 3: mod_base = OTHER; note = guanosine-3'-phosphate
  modified_base 4: mod_base = OTHER; note = 2'-O-methylcytidine-3'-phosphate
  modified_base 5: mod_base = OTHER; note = 2'-O-methyluridine-3'-phosphate
  modified_base 6: mod_base = OTHER; note = guanosine-3'-phosphate
  modified_base 7: mod_base = OTHER; note = adenosine-3'-phosphate
  modified_base 8: mod_base = OTHER; note = guanosine-3'-phosphate
  modified_base 9: mod_base = OTHER; note = guanosine-3'-phosphate
  modified_base 10: mod_base = OTHER; note = 2'-O-methylcytidine-3'-phosphate
  modified_base 11: mod_base = OTHER; note = 2'-O-methylcytidine-3'-phosphate
  modified_base 12: mod_base = OTHER; note = adenosine-3'-phosphate
  modified_base 13: mod_base = OTHER; note = 2'-O-methylcytidine-3'-phosphate
  modified_base 14: mod_base = OTHER; note = guanosine-3'-phosphate
  modified_base 15: mod_base = OTHER; note = adenosine-3'-phosphate
  modified_base 16: mod_base = OTHER; note = guanosine-3'-phosphate
  modified_base 17: mod_base = OTHER; note = guanosine-3'-phosphate
  modified_base 18: mod_base = OTHER; note = 2'-O-methyluridine-3'-phosphate
  modified_base 19: mod_base = OTHER; note = 2'-O-methylcytidine-3'-phosphate
  modified_base 20: mod_base = OTHER; note = 2'-deoxythymidine-3'-phosphorothioate
  misc_feature 1..19: note = RNA
  misc_feature 20..21: note = DNA
gtgctgaggccacgaggtctt

SEQ ID NO: 670 - DNA, 21 bp, synthetic construct
  source 1..21: mol_type = other DNA
  modified_base 1: mod_base = OTHER; note = guanosine-3'-phosphate
  modified_base 2: mod_base = OTHER; note = adenosine-3'-phosphate
  modified_base 3: mod_base = OTHER; note = cytidine-3'-phosphate
  modified_base 4: mod_base = OTHER; note = cytidine-3'-phosphate
  modified_base 5: mod_base = OTHER; note = uridine-3'-phosphate
  modified_base 6: mod_base = OTHER; note = cytidine-3'-phosphate
  modified_base 7: mod_base = OTHER; note = guanosine-3'-phosphate
  modified_base 8: mod_base = OTHER; note = uridine-3'-phosphate
  modified_base 9: mod_base = OTHER; note = guanosine-3'-phosphate
  modified_base 10: mod_base = OTHER; note = guanosine-3'-phosphate
  modified_base 11: mod_base = OTHER; note = cytidine-3'-phosphate
  modified_base 12: mod_base = OTHER; note = cytidine-3'-phosphate
  modified_base 13: mod_base = OTHER; note = uridine-3'-phosphate
  modified_base 14: mod_base = OTHER; note = 2'-O-methylcytidine-3'-phosphate
  modified_base 15: mod_base = OTHER; note = adenosine-3'-phosphate
  modified_base 16: mod_base = OTHER; note = guanosine-3'-phosphate
  modified_base 17: mod_base = OTHER; note = 2'-O-methylcytidine-3'-phosphate
  modified_base 18: mod_base = OTHER; note = adenosine-3'-phosphate
  modified_base 19: mod_base = OTHER; note = cytidine-3'-phosphate
  modified_base 20: mod_base = OTHER; note = 2'-deoxythymidine-3'-phosphorothioate
  misc_feature 1..19: note = RNA
  misc_feature 20..21: note = DNA
gacctcgtggcctcagcactt

SEQ ID NO: 671 - DNA, 21 bp, synthetic construct
  source 1..21: mol_type = other DNA
  modified_base 1: mod_base = OTHER; note = uridine-3'-phosphate
  modified_base 2: mod_base = OTHER; note = guanosine-3'-phosphate
  modified_base 3: mod_base = OTHER; note = cytidine-3'-phosphate
  modified_base 4: mod_base = OTHER; note = uridine-3'-phosphate
  modified_base 5: mod_base = OTHER; note = guanosine-3'-phosphate
  modified_base 6: mod_base = OTHER; note = adenosine-3'-phosphate
  modified_base 7: mod_base = OTHER; note = guanosine-3'-phosphate
  modified_base 8: mod_base = OTHER; note = guanosine-3'-phosphate
  modified_base 9: mod_base = OTHER; note = cytidine-3'-phosphate
  modified_base 10: mod_base = OTHER; note = cytidine-3'-phosphate
  modified_base 11: mod_base = OTHER; note = adenosine-3'-phosphate
  modified_base 12: mod_base = OTHER; note = cytidine-3'-phosphate
  modified_base 13: mod_base = OTHER; note = guanosine-3'-phosphate
  modified_base 14: mod_base = OTHER; note = adenosine-3'-phosphate
  modified_base 15: mod_base = OTHER; note = guanosine-3'-phosphate
  modified_base 16: mod_base = OTHER; note = guanosine-3'-phosphate
  modified_base 17: mod_base = OTHER; note = uridine-3'-phosphate
  modified_base 18: mod_base = OTHER; note = cytidine-3'-phosphate
  modified_base 19: mod_base = OTHER; note = adenosine-3'-phosphate
  modified_base 20: mod_base = OTHER; note = 2'-deoxythymidine-3'-phosphorothioate
  misc_feature 1..19: note = RNA
  misc_feature 20..21: note = DNA
tgctgaggccacgaggtcatt

SEQ ID NO: 672 - DNA, 21 bp, synthetic construct
  source 1..21: mol_type = other DNA
  modified_base 1: mod_base = OTHER; note = uridine-3'-phosphate
  modified_base 2: mod_base = OTHER; note = guanosine-3'-phosphate
  modified_base 3: mod_base = OTHER; note = adenosine-3'-phosphate
  modified_base 4: mod_base = OTHER; note = cytidine-3'-phosphate
  modified_base 5: mod_base = OTHER; note = cytidine-3'-phosphate
  modified_base 6: mod_base = OTHER; note = uridine-3'-phosphate
  modified_base 7: mod_base = OTHER; note = cytidine-3'-phosphate
  modified_base 8: mod_base = OTHER; note = guanosine-3'-phosphate
  modified_base 9: mod_base = OTHER; note = uridine-3'-phosphate
  modified_base 10: mod_base = OTHER; note = guanosine-3'-phosphate
  modified_base 11: mod_base = OTHER; note = guanosine-3'-phosphate
  modified_base 12: mod_base = OTHER; note = cytidine-3'-phosphate
  modified_base 13: mod_base = OTHER; note = cytidine-3'-phosphate
  modified_base 14: mod_base = OTHER; note = uridine-3'-phosphate
  modified_base 15: mod_base = OTHER; note = cytidine-3'-phosphate
  modified_base 16: mod_base = OTHER; note = adenosine-3'-phosphate
  modified_base 17: mod_base = OTHER; note = guanosine-3'-phosphate
  modified_base 18: mod_base = OTHER; note = cytidine-3'-phosphate
  modified_base 19: mod_base = OTHER; note = adenosine-3'-phosphate
  modified_base 20: mod_base = OTHER; note = 2'-deoxythymidine-3'-phosphorothioate
  misc_feature 1..19: note = RNA
  misc_feature 20..21: note = DNA
tgacctcgtggcctcagcatt

SEQ ID NO: 673 - DNA, 21 bp, synthetic construct
  source 1..21: mol_type = other DNA
  modified_base 1: mod_base = OTHER; note = uridine-3'-phosphate
  modified_base 2: mod_base = OTHER; note = guanosine-3'-phosphate
  modified_base 3: mod_base = OTHER; note = cytidine-3'-phosphate
  modified_base 4: mod_base = OTHER; note = uridine-3'-phosphate
  modified_base 5: mod_base = OTHER; note = guanosine-3'-phosphate
  modified_base 6: mod_base = OTHER; note = adenosine-3'-phosphate
  modified_base 7: mod_base = OTHER; note = guanosine-3'-phosphate
  modified_base 8: mod_base = OTHER; note = guanosine-3'-phosphate
  modified_base 9: mod_base = OTHER; note = cytidine-3'-phosphate
  modified_base 10: mod_base = OTHER; note = cytidine-3'-phosphate
  modified_base 11: mod_base = OTHER; note = adenosine-3'-phosphate
  modified_base 12: mod_base = OTHER; note = cytidine-3'-phosphate
  modified_base 13: mod_base = OTHER; note = guanosine-3'-phosphate
  modified_base 14: mod_base = OTHER; note = adenosine-3'-phosphate
  modified_base 15: mod_base = OTHER; note = guanosine-3'-phosphate
  modified_base 16: mod_base = OTHER; note = guanosine-3'-phosphate
  modified_base 17: mod_base = OTHER; note = uridine-3'-phosphate
  modified_base 18: mod_base = OTHER; note = cytidine-3'-phosphate
  modified_base 19: mod_base = OTHER; note = adenosine-3'-phosphate
  modified_base 20: mod_base = OTHER; note = 2'-deoxythymidine-3'-phosphorothioate
  misc_feature 1..19: note = RNA
  misc_feature 20..21: note = DNA
tgctgaggccacgaggtcatt

SEQ ID NO: 674 - DNA, 21 bp, synthetic construct
  source 1..21: mol_type = other DNA
  modified_base 1: mod_base = OTHER; note = uridine-3'-phosphate
  modified_base 2: mod_base = OTHER; note = guanosine-3'-phosphate
  modified_base 3: mod_base = OTHER; note = adenosine-3'-phosphate
  modified_base 4: mod_base = OTHER; note = cytidine-3'-phosphate
  modified_base 5: mod_base = OTHER; note = cytidine-3'-phosphate
  modified_base 6: mod_base = OTHER; note = uridine-3'-phosphate
  modified_base 7: mod_base = OTHER; note = cytidine-3'-phosphate
  modified_base 8: mod_base = OTHER; note = guanosine-3'-phosphate
  modified_base 9: mod_base = OTHER; note = uridine-3'-phosphate
  modified_base 10: mod_base = OTHER; note = guanosine-3'-phosphate
  modified_base 11: mod_base = OTHER; note = guanosine-3'-phosphate
  modified_base 12: mod_base = OTHER; note = cytidine-3'-phosphate
  modified_base 13: mod_base = OTHER; note = cytidine-3'-phosphate
  modified_base 14: mod_base = OTHER; note = uridine-3'-phosphate
  modified_base 15: mod_base = OTHER; note = cytidine-3'-phosphate
  modified_base 16: mod_base = OTHER; note = adenosine-3'-phosphate
  modified_base 17: mod_base = OTHER; note = guanosine-3'-phosphate
  modified_base 18: mod_base = OTHER; note = cytidine-3'-phosphate
  modified_base 19: mod_base = OTHER; note = adenosine-3'-phosphate
  modified_base 20: mod_base = OTHER; note = 2'-deoxythymidine-3'-phosphorothioate
  misc_feature 1..19: note = RNA
  misc_feature 20..21: note = DNA
tgacctcgtggcctcagcatt

SEQ ID NO: 675 - DNA, 21 bp, synthetic construct
  source 1..21: mol_type = other DNA
  modified_base 1: mod_base = OTHER; note = 2'-O-methyluridine-3'-phosphate
  modified_base 2: mod_base = OTHER; note = guanosine-3'-phosphate
  modified_base 3: mod_base = OTHER; note = 2'-O-methylcytidine-3'-phosphate
  modified_base 4: mod_base = OTHER; note = 2'-O-methyluridine-3'-phosphate
  modified_base 5: mod_base = OTHER; note = guanosine-3'-phosphate
  modified_base 6: mod_base = OTHER; note = adenosine-3'-phosphate
  modified_base 7: mod_base = OTHER; note = guanosine-3'-phosphate
  modified_base 8: mod_base = OTHER; note = guanosine-3'-phosphate
  modified_base 9: mod_base = OTHER; note = 2'-O-methylcytidine-3'-phosphate
  modified_base 10: mod_base = OTHER; note = 2'-O-methylcytidine-3'-phosphate
  modified_base 11: mod_base = OTHER; note = adenosine-3'-phosphate
  modified_base 12: mod_base = OTHER; note = 2'-O-methylcytidine-3'-phosphate
  modified_base 13: mod_base = OTHER; note = guanosine-3'-phosphate
  modified_base 14: mod_base = OTHER; note = adenosine-3'-phosphate
  modified_base 15: mod_base = OTHER; note = guanosine-3'-phosphate
  modified_base 16: mod_base = OTHER; note = guanosine-3'-phosphate
  modified_base 17: mod_base = OTHER; note = 2'-O-methyluridine-3'-phosphate
  modified_base 18: mod_base = OTHER; note = 2'-O-methylcytidine-3'-phosphate
  modified_base 19: mod_base = OTHER; note = adenosine-3'-phosphate
  modified_base 20: mod_base = OTHER; note = 2'-deoxythymidine-3'-phosphorothioate
  misc_feature 1..19: note = RNA
  misc_feature 20..21: note = DNA
tgctgaggccacgaggtcatt

SEQ ID NO: 676 - DNA, 21 bp, synthetic construct
  source 1..21: mol_type = other DNA
  modified_base 1: mod_base = OTHER; note = uridine-3'-phosphate
  modified_base 2: mod_base = OTHER; note = guanosine-3'-phosphate
  modified_base 3: mod_base = OTHER; note = adenosine-3'-phosphate
  modified_base 4: mod_base = OTHER; note = cytidine-3'-phosphate
  modified_base 5: mod_base = OTHER; note = cytidine-3'-phosphate
  modified_base 6: mod_base = OTHER; note = uridine-3'-phosphate
  modified_base 7: mod_base = OTHER; note = cytidine-3'-phosphate
  modified_base 8: mod_base = OTHER; note = guanosine-3'-phosphate
  modified_base 9: mod_base = OTHER; note = uridine-3'-phosphate
  modified_base 10: mod_base = OTHER; note = guanosine-3'-phosphate
  modified_base 11: mod_base = OTHER; note = guanosine-3'-phosphate
  modified_base 12: mod_base = OTHER; note = cytidine-3'-phosphate
  modified_base 13: mod_base = OTHER; note = cytidine-3'-phosphate
  modified_base 14: mod_base = OTHER; note = uridine-3'-phosphate
  modified_base 15: mod_base = OTHER; note = 2'-O-methylcytidine-3'-phosphate
  modified_base 16: mod_base = OTHER; note = adenosine-3'-phosphate
  modified_base 17: mod_base = OTHER; note = guanosine-3'-phosphate
  modified_base 18: mod_base = OTHER; note = 2'-O-methylcytidine-3'-phosphate
  modified_base 19: mod_base = OTHER; note = adenosine-3'-phosphate
  modified_base 20: mod_base = OTHER; note = 2'-deoxythymidine-3'-phosphorothioate
  misc_feature 1..19: note = RNA
  misc_feature 20..21: note = DNA
tgacctcgtggcctcagcatt

SEQ ID NO: 677 - DNA, 21 bp, synthetic construct
  source 1..21: mol_type = other DNA
  modified_base 1: mod_base = OTHER; note = 2'-deoxy-2'-fluorouridine-3'-phosphate
  modified_base 2: mod_base = OTHER; note = 2'-O-methylguanosine-3'-phosphate
  modified_base 3: mod_base = OTHER; note = 2'-deoxy-2'-fluorocytidine-3'-phosphate
  modified_base 4: mod_base = OTHER; note = 2'-O-methyluridine-3'-phosphate
  modified_base 5: mod_base = OTHER; note = 2'-deoxy-2'-fluoroguanosine-3'-phosphate
  modified_base 6: mod_base = OTHER; note = 2'-O-methyladenosine-3'-phosphate
  modified_base 7: mod_base = OTHER; note = 2'-deoxy-2'-fluoroguanosine-3'-phosphate
  modified_base 8: mod_base = OTHER; note = 2'-O-methylguanosine-3'-phosphate
  modified_base 9: mod_base = OTHER; note = 2'-deoxy-2'-fluorocytidine-3'-phosphate
  modified_base 10: mod_base = OTHER; note = 2'-O-methylcytidine-3'-phosphate
  modified_base 11: mod_base = OTHER; note = 2'-deoxy-2'-fluoroadenosine-3'-phosphate
  modified_base 12: mod_base = OTHER; note = 2'-O-methylcytidine-3'-phosphate
  modified_base 13: mod_base = OTHER; note = 2'-deoxy-2'-fluoroguanosine-3'-phosphate
  modified_base 14: mod_base = OTHER; note = 2'-O-methyladenosine-3'-phosphate
  modified_base 15: mod_base = OTHER; note = 2'-deoxy-2'-fluoroguanosine-3'-phosphate
  modified_base 16: mod_base = OTHER; note = 2'-O-methylguanosine-3'-phosphate
  modified_base 17: mod_base = OTHER; note = 2'-deoxy-2'-fluorouridine-3'-phosphate
  modified_base 18: mod_base = OTHER; note = 2'-O-methylcytidine-3'-phosphate
  modified_base 19: mod_base = OTHER; note = 2'-deoxy-2'-fluoroadenosine-3'-phosphate
  modified_base 20: mod_base = OTHER; note = 2'-deoxythymidine-3'-phosphorothioate
  misc_feature 1..19: note = RNA
  misc_feature 20..21: note = DNA
tgctgaggccacgaggtcatt

SEQ ID NO: 678 - DNA, 21 bp, synthetic construct
  source 1..21: mol_type = other DNA
  modified_base 1: mod_base = OTHER; note = 2'-O-methyluridine-3'-phosphate 5'phosphate
  modified_base 2: mod_base = OTHER; note = 2'-deoxy-2'-fluoroguanosine-3'-phosphate
  modified_base 3: mod_base = OTHER; note = 2'-O-methyladenosine-3'-phosphate
  modified_base 4: mod_base = OTHER; note = 2'-deoxy-2'-fluorocytidine-3'-phosphate
  modified_base 5: mod_base = OTHER; note = 2'-O-methylcytidine-3'-phosphate
  modified_base 6: mod_base = OTHER; note = 2'-deoxy-2'-fluorouridine-3'-phosphate
  modified_base 7: mod_base = OTHER; note = 2'-O-methylcytidine-3'-phosphate
  modified_base 8: mod_base = OTHER; note = 2'-deoxy-2'-fluoroguanosine-3'-phosphate
  modified_base 9: mod_base = OTHER; note = 2'-O-methyluridine-3'-phosphate
  modified_base 10: mod_base = OTHER; note = 2'-deoxy-2'-fluoroguanosine-3'-phosphate
  modified_base 11: mod_base = OTHER; note = 2'-O-methylguanosine-3'-phosphate
  modified_base 12: mod_base = OTHER; note = 2'-deoxy-2'-fluorocytidine-3'-phosphate
  modified_base 13: mod_base = OTHER; note = 2'-O-methylcytidine-3'-phosphate
  modified_base 14: mod_base = OTHER; note = 2'-deoxy-2'-fluorouridine-3'-phosphate
  modified_base 15: mod_base = OTHER; note = 2'-O-methylcytidine-3'-phosphate
  modified_base 16: mod_base = OTHER; note = 2'-deoxy-2'-fluoroadenosine-3'-phosphate
  modified_base 17: mod_base = OTHER; note = 2'-O-methylguanosine-3'-phosphate
  modified_base 18: mod_base = OTHER; note = 2'-deoxy-2'-fluorocytidine-3'-phosphate
  modified_base 19: mod_base = OTHER; note = 2'-O-methyladenosine-3'-phosphate
  modified_base 20: mod_base = OTHER; note = 2'-deoxythymidine-3'-phosphorothioate
  misc_feature 1..19: note = RNA
  misc_feature 20..21: note = DNA
tgacctcgtggcctcagcatt

SEQ ID NO: 679 - DNA, 21 bp, synthetic construct
  source 1..21: mol_type = other DNA
  modified_base 1: mod_base = OTHER; note = 2'-deoxy-2'-fluorouridine-3'-phosphate
  modified_base 2: mod_base = OTHER; note = guanosine-3'-phosphate
  modified_base 3: mod_base = OTHER; note = 2'-deoxy-2'-fluorocytidine-3'-phosphate
  modified_base 4: mod_base = OTHER; note = 2'-deoxy-2'-fluorouridine-3'-phosphate
  modified_base 5: mod_base = OTHER; note = guanosine-3'-phosphate
  modified_base 6: mod_base = OTHER; note = adenosine-3'-phosphate
  modified_base 7: mod_base = OTHER; note = guanosine-3'-phosphate
  modified_base 8: mod_base = OTHER; note = guanosine-3'-phosphate
  modified_base 9: mod_base = OTHER; note = 2'-deoxy-2'-fluorocytidine-3'-phosphate
  modified_base 10: mod_base = OTHER; note = 2'-deoxy-2'-fluorocytidine-3'-phosphate
  modified_base 11: mod_base = OTHER; note = adenosine-3'-phosphate
  modified_base 12: mod_base = OTHER; note = 2'-deoxy-2'-fluorocytidine-3'-phosphate
  modified_base 13: mod_base = OTHER; note = guanosine-3'-phosphate
  modified_base 14: mod_base = OTHER; note = adenosine-3'-phosphate
  modified_base 15: mod_base = OTHER; note = guanosine-3'-phosphate
  modified_base 16: mod_base = OTHER; note = guanosine-3'-phosphate
  modified_base 17: mod_base = OTHER; note = 2'-deoxy-2'-fluorouridine-3'-phosphate
  modified_base 18: mod_base = OTHER; note = 2'-deoxy-2'-fluorocytidine-3'-phosphate
  modified_base 19: mod_base = OTHER; note = adenosine-3'-phosphate
  modified_base 20: mod_base = OTHER; note = 2'-deoxythymidine-3'-phosphorothioate
  misc_feature 1..19: note = RNA
  misc_feature 20..21: note = DNA
tgctgaggccacgaggtcatt

SEQ ID NO: 680 - DNA, 21 bp, synthetic construct
  source 1..21: mol_type = other DNA
  modified_base 1: mod_base = OTHER; note = 2'-deoxy-2'-fluorouridine-3'-phosphate
  modified_base 2: mod_base = OTHER; note = guanosine-3'-phosphate
  modified_base 3: mod_base = OTHER; note = adenosine-3'-phosphate
  modified_base 4: mod_base = OTHER; note = 2'-deoxy-2'-fluorocytidine-3'-phosphate
  modified_base 5: mod_base = OTHER; note = 2'-deoxy-2'-fluorocytidine-3'-phosphate
  modified_base 6: mod_base = OTHER; note = 2'-deoxy-2'-fluorouridine-3'-phosphate
  modified_base 7: mod_base = OTHER; note = 2'-deoxy-2'-fluorocytidine-3'-phosphate
  modified_base 8: mod_base = OTHER; note = guanosine-3'-phosphate
  modified_base 9: mod_base = OTHER; note = 2'-deoxy-2'-fluorouridine-3'-phosphate
  modified_base 10: mod_base = OTHER; note = guanosine-3'-phosphate
  modified_base 11: mod_base = OTHER; note = guanosine-3'-phosphate
  modified_base 12: mod_base = OTHER; note = 2'-deoxy-2'-fluorocytidine-3'-phosphate
  modified_base 13: mod_base = OTHER; note = 2'-deoxy-2'-fluorocytidine-3'-phosphate
  modified_base 14: mod_base = OTHER; note = 2'-deoxy-2'-fluorouridine-3'-phosphate
  modified_base 15: mod_base = OTHER; note = 2'-deoxy-2'-fluorocytidine-3'-phosphate
  modified_base 16: mod_base = OTHER; note = adenosine-3'-phosphate
  modified_base 17: mod_base = OTHER; note = guanosine-3'-phosphate
  modified_base 18: mod_base = OTHER; note = 2'-deoxy-2'-fluorocytidine-3'-phosphate
  modified_base 19: mod_base = OTHER; note = adenosine-3'-phosphate
  modified_base 20: mod_base = OTHER; note = 2'-deoxythymidine-3'-phosphorothioate
  misc_feature 1..19: note = RNA
  misc_feature 20..21: note = DNA
tgacctcgtggcctcagcatt

SEQ ID NO: 681 - DNA, 21 bp, synthetic construct
  source 1..21: mol_type = other DNA
  modified_base 1: mod_base = OTHER; note = uridine-3'-phosphate
  modified_base 2: mod_base = OTHER; note = 2'-O-methylguanosine-3'-phosphate
  modified_base 3: mod_base = OTHER; note = cytidine-3'-phosphate
  modified_base 4: mod_base = OTHER; note = 2'-O-methyluridine-3'-phosphate
  modified_base 5: mod_base = OTHER; note = guanosine-3'-phosphate
  modified_base 6: mod_base = OTHER; note = 2'-O-methyladenosine-3'-phosphate
  modified_base 7: mod_base = OTHER; note = guanosine-3'-phosphate
  modified_base 8: mod_base = OTHER; note = 2'-O-methylguanosine-3'-phosphate
  modified_base 9: mod_base = OTHER; note = cytidine-3'-phosphate
  modified_base 10: mod_base = OTHER; note = 2'-O-methylcytidine-3'-phosphate
  modified_base 11: mod_base = OTHER; note = adenosine-3'-phosphate
  modified_base 12: mod_base = OTHER; note = 2'-O-methylcytidine-3'-phosphate
  modified_base 13: mod_base = OTHER; note = guanosine-3'-phosphate
  modified_base 14: mod_base = OTHER; note = 2'-O-methyladenosine-3'-phosphate
  modified_base 15: mod_base = OTHER; note = guanosine-3'-phosphate
  modified_base 16: mod_base = OTHER; note = 2'-O-methylguanosine-3'-phosphate
  modified_base 17: mod_base = OTHER; note = uridine-3'-phosphate
  modified_base 18: mod_base = OTHER; note = 2'-O-methylcytidine-3'-phosphate
  modified_base 19: mod_base = OTHER; note = adenosine-3'-phosphate
  modified_base 20: mod_base = OTHER; note = 2'-deoxythymidine-3'-phosphorothioate
  misc_feature 1..19: note = RNA
  misc_feature 20..21: note = DNA
tgctgaggccacgaggtcatt

SEQ ID NO: 682 - DNA, 21 bp, synthetic construct
  source 1..21: mol_type = other DNA
  modified_base 1: mod_base = OTHER; note = 2'-O-methyluridine-3'-phosphate 5'phosphate
  modified_base 2: mod_base = OTHER; note = 2'-deoxy-2'-fluoroguanosine-3'-phosphate
  modified_base 3: mod_base = OTHER; note = 2'-O-methyladenosine-3'-phosphate
  modified_base 4: mod_base = OTHER; note = 2'-deoxy-2'-fluorocytidine-3'-phosphate
  modified_base 5: mod_base = OTHER; note = 2'-O-methylcytidine-3'-phosphate
  modified_base 6: mod_base = OTHER; note = 2'-deoxy-2'-fluorouridine-3'-phosphate
  modified_base 7: mod_base = OTHER; note = 2'-O-methylcytidine-3'-phosphate
  modified_base 8: mod_base = OTHER; note = 2'-deoxy-2'-fluoroguanosine-3'-phosphate
  modified_base 9: mod_base = OTHER; note = 2'-O-methyluridine-3'-phosphate
  modified_base 10: mod_base = OTHER; note = 2'-deoxy-2'-fluoroguanosine-3'-phosphate
  modified_base 11: mod_base = OTHER; note = 2'-O-methylguanosine-3'-phosphate
  modified_base 12: mod_base = OTHER; note = 2'-deoxy-2'-fluorocytidine-3'-phosphate
  modified_base 13: mod_base = OTHER; note = 2'-O-methylcytidine-3'-phosphate
  modified_base 14: mod_base = OTHER; note = 2'-deoxy-2'-fluorouridine-3'-phosphate
  modified_base 15: mod_base = OTHER; note = 2'-O-methylcytidine-3'-phosphate
  modified_base 16: mod_base = OTHER; note = 2'-deoxy-2'-fluoroadenosine-3'-phosphate
  modified_base 17: mod_base = OTHER; note = 2'-O-methylguanosine-3'-phosphate
  modified_base 18: mod_base = OTHER; note = 2'-deoxy-2'-fluorocytidine-3'-phosphate
  modified_base 19: mod_base = OTHER; note = 2'-O-methyladenosine-3'-phosphate
  modified_base 20: mod_base = OTHER; note = 2'-deoxythymidine-3'-phosphorothioate
  misc_feature 1..19: note = RNA
  misc_feature 20..21: note = DNA
tgacctcgtggcctcagcatt

SEQ ID NO: 683 - DNA, 21 bp, synthetic construct
  source 1..21: mol_type = other DNA
  modified_base 1: mod_base = OTHER; note = uridine-3'-phosphate
  modified_base 2: mod_base = OTHER; note = 2'-O-methylguanosine-3'-phosphate
  modified_base 3: mod_base = OTHER; note = cytidine-3'-phosphate
  modified_base 4: mod_base = OTHER; note = 2'-O-methyluridine-3'-phosphate
  modified_base 5: mod_base = OTHER; note = guanosine-3'-phosphate
  modified_base 6: mod_base = OTHER; note = 2'-O-methyladenosine-3'-phosphate
  modified_base 7: mod_base = OTHER; note = guanosine-3'-phosphate
  modified_base 8: mod_base = OTHER; note = 2'-O-methylguanosine-3'-phosphate
  modified_base 9: mod_base = OTHER; note = cytidine-3'-phosphate
  modified_base 10: mod_base = OTHER; note = 2'-O-methylcytidine-3'-phosphate
  modified_base 11: mod_base = OTHER; note = adenosine-3'-phosphate
  modified_base 12: mod_base = OTHER; note = 2'-O-methylcytidine-3'-phosphate
  modified_base 13: mod_base = OTHER; note = guanosine-3'-phosphate
  modified_base 14: mod_base = OTHER; note = 2'-O-methyladenosine-3'-phosphate
  modified_base 15: mod_base = OTHER; note = guanosine-3'-phosphate
  modified_base 16: mod_base = OTHER; note = 2'-O-methylguanosine-3'-phosphate
  modified_base 17: mod_base = OTHER; note = uridine-3'-phosphate
  modified_base 18: mod_base = OTHER; note = 2'-O-methylcytidine-3'-phosphate
  modified_base 19: mod_base = OTHER; note = adenosine-3'-phosphate
  modified_base 20: mod_base = OTHER; note = 2'-deoxythymidine-3'-phosphorothioate
  misc_feature 1..19: note = RNA
  misc_feature 20..21: note = DNA
tgctgaggccacgaggtcatt

SEQ ID NO: 684 - DNA, 21 bp, synthetic construct
  source 1..21: mol_type = other DNA
  modified_base 1: mod_base = OTHER; note = 2'-deoxy-2'-fluorouridine-3'-phosphate
  modified_base 2: mod_base = OTHER; note = guanosine-3'-phosphate
  modified_base 3: mod_base = OTHER; note = adenosine-3'-phosphate
  modified_base 4: mod_base = OTHER; note = 2'-deoxy-2'-fluorocytidine-3'-phosphate
  modified_base 5: mod_base = OTHER; note = 2'-deoxy-2'-fluorocytidine-3'-phosphate
  modified_base 6: mod_base = OTHER; note = 2'-deoxy-2'-fluorouridine-3'-phosphate
  modified_base 7: mod_base = OTHER; note = 2'-deoxy-2'-fluorocytidine-3'-phosphate
  modified_base 8: mod_base = OTHER; note = guanosine-3'-phosphate
  modified_base 9: mod_base = OTHER; note = 2'-deoxy-2'-fluorouridine-3'-phosphate
  modified_base 10: mod_base = OTHER; note = guanosine-3'-phosphate
  modified_base 11: mod_base = OTHER; note = guanosine-3'-phosphate
  modified_base 12: mod_base = OTHER; note = 2'-deoxy-2'-fluorocytidine-3'-phosphate
  modified_base 13: mod_base = OTHER; note = 2'-deoxy-2'-fluorocytidine-3'-phosphate
  modified_base 14: mod_base = OTHER; note = 2'-deoxy-2'-fluorouridine-3'-phosphate
  modified_base 15: mod_base = OTHER; note = 2'-deoxy-2'-fluorocytidine-3'-phosphate
  modified_base 16: mod_base = OTHER; note = adenosine-3'-phosphate
  modified_base 17: mod_base = OTHER; note = guanosine-3'-phosphate
  modified_base 18: mod_base = OTHER; note = 2'-deoxy-2'-fluorocytidine-3'-phosphate
  modified_base 19: mod_base = OTHER; note = adenosine-3'-phosphate
  modified_base 20: mod_base = OTHER; note = 2'-deoxythymidine-3'-phosphorothioate
  misc_feature 1..19: note = RNA
  misc_feature 20..21: note = DNA
tgacctcgtggcctcagcatt

SEQ ID NO: 685 - DNA, 21 bp, synthetic construct
  source 1..21: mol_type = other DNA
  modified_base 1: mod_base = OTHER; note = 2'-deoxy-2'-fluorouridine-3'-phosphate
  modified_base 2: mod_base = OTHER; note = 2'-O-methylguanosine-3'-phosphate
  modified_base 3: mod_base = OTHER; note = 2'-deoxy-2'-fluorocytidine-3'-phosphate
  modified_base 4: mod_base = OTHER; note = 2'-O-methyluridine-3'-phosphate
  modified_base 5: mod_base = OTHER; note = 2'-deoxy-2'-fluoroguanosine-3'-phosphate
  modified_base 6: mod_base = OTHER; note = 2'-O-methyladenosine-3'-phosphate
  modified_base 7: mod_base = OTHER; note = 2'-deoxy-2'-fluoroguanosine-3'-phosphate
  modified_base 8: mod_base = OTHER; note = 2'-O-methylguanosine-3'-phosphate
  modified_base 9: mod_base = OTHER; note = 2'-deoxy-2'-fluorocytidine-3'-phosphate
  modified_base 10: mod_base = OTHER; note = 2'-O-methylcytidine-3'-phosphate
  modified_base 11: mod_base = OTHER; note = 2'-deoxy-2'-fluoroadenosine-3'-phosphate
  modified_base 12: mod_base = OTHER; note = 2'-O-methylcytidine-3'-phosphate
  modified_base 13: mod_base = OTHER; note = 2'-deoxy-2'-fluoroguanosine-3'-phosphate
  modified_base 14: mod_base = OTHER; note = 2'-O-methyladenosine-3'-phosphate
  modified_base 15: mod_base = OTHER; note = 2'-deoxy-2'-fluoroguanosine-3'-phosphate
  modified_base 16: mod_base = OTHER; note = 2'-O-methylguanosine-3'-phosphate
  modified_base 17: mod_base = OTHER; note = 2'-deoxy-2'-fluorouridine-3'-phosphate
  modified_base 18: mod_base = OTHER; note = 2'-O-methylcytidine-3'-phosphate
  modified_base 19: mod_base = OTHER; note = 2'-deoxy-2'-fluoroadenosine-3'-phosphate
  modified_base 20: mod_base = OTHER; note = 2'-deoxythymidine-3'-phosphorothioate
  misc_feature 1..19: note = RNA
  misc_feature 20..21: note = DNA
tgctgaggccacgaggtcatt

SEQ ID NO: 686 - DNA, 21 bp, synthetic construct
  source 1..21: mol_type = other DNA
  modified_base 1: mod_base = OTHER; note = uridine-3'-phosphate
  modified_base 2: mod_base = OTHER; note = guanosine-3'-phosphate
  modified_base 3: mod_base = OTHER; note = adenosine-3'-phosphate
  modified_base 4: mod_base = OTHER; note = cytidine-3'-phosphate
  modified_base 5: mod_base = OTHER; note = cytidine-3'-phosphate
  modified_base 6: mod_base = OTHER; note = 2'-O-methyluridine-3'-phosphate
  modified_base 7: mod_base = OTHER; note = 2'-O-methylcytidine-3'-phosphate
  modified_base 8: mod_base = OTHER; note = guanosine-3'-phosphate
  modified_base 9: mod_base = OTHER; note = uridine-3'-phosphate
  modified_base 10: mod_base = OTHER; note = 2'-O-methylguanosine-3'-phosphate
  modified_base 11: mod_base = OTHER; note = 2'-O-methylguanosine-3'-phosphate
  modified_base 12: mod_base = OTHER; note = cytidine-3'-phosphate
  modified_base 13: mod_base = OTHER; note = cytidine-3'-phosphate
  modified_base 14: mod_base = OTHER; note = uridine-3'-phosphate
  modified_base 15: mod_base = OTHER; note = cytidine-3'-phosphate
  modified_base 16: mod_base = OTHER; note = adenosine-3'-phosphate
  modified_base 17: mod_base = OTHER; note = 2'-O-methylguanosine-3'-phosphate
  modified_base 18: mod_base = OTHER; note = 2'-O-methylcytidine-3'-phosphate
  modified_base 19: mod_base = OTHER; note = 2'-O-methyladenosine-3'-phosphate
  modified_base 20: mod_base = OTHER; note = 2'-deoxythymidine-3'-phosphorothioate
  misc_feature 1..19: note = RNA
  misc_feature 20..21: note = DNA
tgacctcgtggcctcagcatt

SEQ ID NO: 687 - DNA, 21 bp, synthetic construct
  source 1..21: mol_type = other DNA
  modified_base 1: mod_base = OTHER; note = 2'-deoxy-2'-fluorouridine-3'-phosphate
  modified_base 2: mod_base = OTHER; note = guanosine-3'-phosphate
  modified_base 3: mod_base = OTHER; note = 2'-deoxy-2'-fluorocytidine-3'-phosphate
  modified_base 4: mod_base = OTHER; note = 2'-deoxy-2'-fluorouridine-3'-phosphate
  modified_base 5: mod_base = OTHER; note = guanosine-3'-phosphate
  modified_base 6: mod_base = OTHER; note = adenosine-3'-phosphate
  modified_base 7: mod_base = OTHER; note = guanosine-3'-phosphate
  modified_base 8: mod_base = OTHER; note = guanosine-3'-phosphate
  modified_base 9: mod_base = OTHER; note = 2'-deoxy-2'-fluorocytidine-3'-phosphate
  modified_base 10: mod_base = OTHER; note = 2'-deoxy-2'-fluorocytidine-3'-phosphate
  modified_base 11: mod_base = OTHER; note = adenosine-3'-phosphate
  modified_base 12: mod_base = OTHER; note = 2'-deoxy-2'-fluorocytidine-3'-phosphate
  modified_base 13: mod_base = OTHER; note = guanosine-3'-phosphate
  modified_base 14: mod_base = OTHER; note = adenosine-3'-phosphate
  modified_base 15: mod_base = OTHER; note = guanosine-3'-phosphate
  modified_base 16: mod_base = OTHER; note = guanosine-3'-phosphate
  modified_base 17: mod_base = OTHER; note = 2'-deoxy-2'-fluorouridine-3'-phosphate
  modified_base 18: mod_base = OTHER; note = 2'-deoxy-2'-fluorocytidine-3'-phosphate
  modified_base 19: mod_base = OTHER; note = adenosine-3'-phosphate
  modified_base 20: mod_base = OTHER; note = 2'-deoxythymidine-3'-phosphorothioate
  misc_feature 1..19: note = RNA
  misc_feature 20..21: note = DNA
tgctgaggccacgaggtcatt

SEQ ID NO: 688 - DNA, 21 bp, synthetic construct
  source 1..21: mol_type = other DNA
  modified_base 1: mod_base = OTHER; note = uridine-3'-phosphate
  modified_base 2: mod_base = OTHER; note = guanosine-3'-phosphate
  modified_base 3: mod_base = OTHER; note = adenosine-3'-phosphate
  modified_base 4: mod_base = OTHER; note = cytidine-3'-phosphate
  modified_base 5: mod_base = OTHER; note = cytidine-3'-phosphate
  modified_base 6: mod_base = OTHER; note = 2'-O-methyluridine-3'-phosphate
  modified_base 7: mod_base = OTHER; note = 2'-O-methylcytidine-3'-phosphate
  modified_base 8: mod_base = OTHER; note = guanosine-3'-phosphate
  modified_base 9: mod_base = OTHER; note = uridine-3'-phosphate
  modified_base 10: mod_base = OTHER; note = 2'-O-methylguanosine-3'-phosphate
  modified_base 11: mod_base = OTHER; note = 2'-O-methylguanosine-3'-phosphate
  modified_base 12: mod_base = OTHER; note = cytidine-3'-phosphate
  modified_base 13: mod_base = OTHER; note = cytidine-3'-phosphate
  modified_base 14: mod_base = OTHER; note = uridine-3'-phosphate
  modified_base 15: mod_base = OTHER; note = cytidine-3'-phosphate
  modified_base 16: mod_base = OTHER; note = adenosine-3'-phosphate
  modified_base 17: mod_base = OTHER; note = 2'-O-methylguanosine-3'-phosphate
  modified_base 18: mod_base = OTHER; note = 2'-O-methylcytidine-3'-phosphate
  modified_base 19: mod_base = OTHER; note = 2'-O-methyladenosine-3'-phosphate
  modified_base 20: mod_base = OTHER; note = 2'-deoxythymidine-3'-phosphorothioate
  misc_feature 1..19: note = RNA
  misc_feature 20..21: note = DNA
tgacctcgtggcctcagcatt

SEQ ID NO: 689 - DNA, 21 bp, synthetic construct
  source 1..21: mol_type = other DNA
  modified_base 1: mod_base = OTHER; note = uridine-3'-phosphate
  modified_base 2: mod_base = OTHER; note = 2'-O-methylguanosine-3'-phosphate
  modified_base 3: mod_base = OTHER; note = cytidine-3'-phosphate
  modified_base 4: mod_base = OTHER; note = 2'-O-methyluridine-3'-phosphate
  modified_base 5: mod_base = OTHER; note = guanosine-3'-phosphate
  modified_base 6: mod_base = OTHER; note = 2'-O-methyladenosine-3'-phosphate
  modified_base 7: mod_base = OTHER; note = guanosine-3'-phosphate
  modified_base 8: mod_base = OTHER; note = 2'-O-methylguanosine-3'-phosphate
  modified_base 9: mod_base = OTHER; note = cytidine-3'-phosphate
  modified_base 10: mod_base = OTHER; note = 2'-O-methylcytidine-3'-phosphate
  modified_base 11: mod_base = OTHER; note = adenosine-3'-phosphate
  modified_base 12: mod_base = OTHER; note = 2'-O-methylcytidine-3'-phosphate
  modified_base 13: mod_base = OTHER; note = guanosine-3'-phosphate
  modified_base 14: mod_base = OTHER; note = 2'-O-methyladenosine-3'-phosphate
  modified_base 15: mod_base = OTHER; note = guanosine-3'-phosphate
  modified_base 16: mod_base = OTHER; note = 2'-O-methylguanosine-3'-phosphate
  modified_base 17: mod_base = OTHER; note = uridine-3'-phosphate
  modified_base 18: mod_base = OTHER; note = 2'-O-methylcytidine-3'-phosphate
  modified_base 19: mod_base = OTHER; note = adenosine-3'-phosphate
  modified_base 20: mod_base = OTHER; note = 2'-deoxythymidine-3'-phosphorothioate
  misc_feature 1..19: note = RNA
  misc_feature 20..21: note = DNA
tgctgaggccacgaggtcatt

SEQ ID NO: 690 - DNA, 21 bp, synthetic construct
  source 1..21: mol_type = other DNA
  modified_base 1: mod_base = OTHER; note = uridine-3'-phosphate
  modified_base 2: mod_base = OTHER; note = guanosine-3'-phosphate
  modified_base 3: mod_base = OTHER; note = adenosine-3'-phosphate
  modified_base 4: mod_base = OTHER; note = cytidine-3'-phosphate
  modified_base 5: mod_base = OTHER; note = cytidine-3'-phosphate
  modified_base 6: mod_base = OTHER; note = 2'-O-methyluridine-3'-phosphate
  modified_base 7: mod_base = OTHER; note = 2'-O-methylcytidine-3'-phosphate
  modified_base 8: mod_base = OTHER; note = guanosine-3'-phosphate
  modified_base 9: mod_base = OTHER; note = uridine-3'-phosphate
  modified_base 10: mod_base = OTHER; note = 2'-O-methylguanosine-3'-phosphate
  modified_base 11: mod_base = OTHER; note = 2'-O-methylguanosine-3'-phosphate
  modified_base 12: mod_base = OTHER; note = cytidine-3'-phosphate
  modified_base 13: mod_base = OTHER; note = cytidine-3'-phosphate
  modified_base 14: mod_base = OTHER; note = uridine-3'-phosphate
  modified_base 15: mod_base = OTHER; note = cytidine-3'-phosphate
  modified_base 16: mod_base = OTHER; note = adenosine-3'-phosphate
  modified_base 17: mod_base = OTHER; note = 2'-O-methylguanosine-3'-phosphate
  modified_base 18: mod_base = OTHER; note = 2'-O-methylcytidine-3'-phosphate
  modified_base 19: mod_base = OTHER; note = 2'-O-methyladenosine-3'-phosphate
  modified_base 20: mod_base = OTHER; note = 2'-deoxythymidine-3'-phosphorothioate
  misc_feature 1..19: note = RNA
  misc_feature 20..21: note = DNA
tgacctcgtggcctcagcatt

SEQ ID NO: 691 - DNA, 21 bp, synthetic construct
  source 1..21: mol_type = other DNA
  modified_base 1: mod_base = OTHER; note = 2'-deoxy-2'-fluoroguanosine-3'-phosphate
  modified_base 2: mod_base = OTHER; note = 2'-O-methyluridine-3'-phosphate
  modified_base 3: mod_base = OTHER; note = 2'-deoxy-2'-fluoroguanosine-3'-phosphate
  modified_base 4: mod_base = OTHER; note = 2'-O-methylguanosine-3'-phosphate
  modified_base 5: mod_base = OTHER; note = 2'-deoxy-2'-fluorouridine-3'-phosphate
  modified_base 6: mod_base = OTHER; note = 2'-O-methylcytidine-3'-phosphate
  modified_base 7: mod_base = OTHER; note = 2'-deoxy-2'-fluoroadenosine-3'-phosphate
  modified_base 8: mod_base = OTHER; note = 2'-O-methylguanosine-3'-phosphate
  modified_base 9: mod_base = OTHER; note = 2'-deoxy-2'-fluorocytidine-3'-phosphate
  modified_base 10: mod_base = OTHER; note = 2'-O-methylguanosine-3'-phosphate
  modified_base 11: mod_base = OTHER; note = 2'-deoxy-2'-fluoroguanosine-3'-phosphate
  modified_base 12: mod_base = OTHER; note = 2'-O-methylcytidine-3'-phosphate
  modified_base 13: mod_base = OTHER; note = 2'-deoxy-2'-fluorocytidine-3'-phosphate
  modified_base 14: mod_base = OTHER; note = 2'-O-methylguanosine-3'-phosphate
  modified_base 15: mod_base = OTHER; note = 2'-deoxy-2'-fluoroguanosine-3'-phosphate
  modified_base 16: mod_base = OTHER; note = 2'-O-methylguanosine-3'-phosphate
  modified_base 17: mod_base = OTHER; note = 2'-deoxy-2'-fluoroadenosine-3'-phosphate
  modified_base 18: mod_base = OTHER; note = 2'-O-methyluridine-3'-phosphate
  modified_base 19: mod_base = OTHER; note = 2'-deoxy-2'-fluoroguanosine-3'-phosphate
  modified_base 20: mod_base = OTHER; note = 2'-deoxythymidine-3'-phosphorothioate
  misc_feature 1..19: note = RNA
  misc_feature 20..21: note = DNA
gtggtcagcggccgggatgtt

SEQ ID NO: 692 - DNA, 21 bp, synthetic construct
  source 1..21: mol_type = other DNA
  modified_base 1: mod_base = OTHER; note = 2'-O-methylcytidine-3'-phosphate 5'phosphate
  modified_base 2: mod_base = OTHER; note = 2'-deoxy-2'-fluoroadenosine-3'-phosphate
  modified_base 3: mod_base = OTHER; note = 2'-O-methyluridine-3'-phosphate
  modified_base 4: mod_base = OTHER; note = 2'-deoxy-2'-fluorocytidine-3'-phosphate
  modified_base 5: mod_base = OTHER; note = 2'-O-methylcytidine-3'-phosphate
  modified_base 6: mod_base = OTHER; note = 2'-deoxy-2'-fluorocytidine-3'-phosphate
  modified_base 7: mod_base = OTHER; note = 2'-O-methylguanosine-3'-phosphate
  modified_base 8: mod_base = OTHER; note = 2'-deoxy-2'-fluoroguanosine-3'-phosphate
  modified_base 9: mod_base = OTHER; note = 2'-O-methylcytidine-3'-phosphate
  modified_base 10: mod_base = OTHER; note = 2'-deoxy-2'-fluorocytidine-3'-phosphate
  modified_base 11: mod_base = OTHER; note = 2'-O-methylguanosine-3'-phosphate
  modified_base 12: mod_base = OTHER; note = 2'-deoxy-2'-fluorocytidine-3'-phosphate
  modified_base 13: mod_base = OTHER; note = 2'-O-methyluridine-3'-phosphate
  modified_base 14: mod_base = OTHER; note = 2'-deoxy-2'-fluoroguanosine-3'-phosphate
  modified_base 15: mod_base = OTHER; note = 2'-O-methyladenosine-3'-phosphate
  modified_base 16: mod_base = OTHER; note = 2'-deoxy-2'-fluorocytidine-3'-phosphate
  modified_base 17: mod_base = OTHER; note = 2'-O-methylcytidine-3'-phosphate
  modified_base 18: mod_base = OTHER; note = 2'-deoxy-2'-fluoroadenosine-3'-phosphate
  modified_base 19: mod_base = OTHER; note = 2'-O-methylcytidine-3'-phosphate
  modified_base 20: mod_base = OTHER; note = 2'-deoxythymidine-3'-phosphorothioate
  misc_feature 1..19: note = RNA
  misc_feature 20..21: note = DNA
catcccggccgctgaccactt

SEQ ID NO: 693 - DNA, 21 bp, synthetic construct
  source 1..21: mol_type = other DNA
  modified_base 1: mod_base = OTHER; note = guanosine-3'-phosphate
  modified_base 2: mod_base = OTHER; note = 2'-deoxy-2'-fluorouridine-3'-phosphate
  modified_base 3: mod_base = OTHER; note = guanosine-3'-phosphate
  modified_base 4: mod_base = OTHER; note = guanosine-3'-phosphate
  modified_base 5: mod_base = OTHER; note = 2'-deoxy-2'-fluorouridine-3'-phosphate
  modified_base 6: mod_base = OTHER; note = 2'-deoxy-2'-fluorocytidine-3'-phosphate
  modified_base 7: mod_base = OTHER; note = adenosine-3'-phosphate
  modified_base 8: mod_base = OTHER; note = guanosine-3'-phosphate
  modified_base 9: mod_base = OTHER; note = 2'-deoxy-2'-fluorocytidine-3'-phosphate
  modified_base 10: mod_base = OTHER; note = guanosine-3'-phosphate
  modified_base 11: mod_base = OTHER; note = guanosine-3'-phosphate
  modified_base 12: mod_base = OTHER; note = 2'-deoxy-2'-fluorocytidine-3'-phosphate
  modified_base 13: mod_base = OTHER; note = 2'-deoxy-2'-fluorocytidine-3'-phosphate
  modified_base 14: mod_base = OTHER; note = guanosine-3'-phosphate
  modified_base 15: mod_base = OTHER; note = guanosine-3'-phosphate
  modified_base 16: mod_base = OTHER; note = guanosine-3'-phosphate
  modified_base 17: mod_base = OTHER; note = adenosine-3'-phosphate
  modified_base 18: mod_base = OTHER; note = 2'-deoxy-2'-fluorouridine-3'-phosphate
  modified_base 19: mod_base = OTHER; note = guanosine-3'-phosphate
  modified_base 20: mod_base = OTHER; note = 2'-deoxythymidine-3'-phosphorothioate
  misc_feature 1..19: note = RNA
  misc_feature 20..21: note = DNA
gtggtcagcggccgggatgtt

SEQ ID NO: 694 - DNA, 21 bp, synthetic construct
  source 1..21: mol_type = other DNA
  modified_base 1: mod_base = OTHER; note = 2'-deoxy-2'-fluorocytidine-3'-phosphate
  modified_base 2: mod_base = OTHER; note = adenosine-3'-phosphate
  modified_base 3: mod_base = OTHER; note = 2'-deoxy-2'-fluorouridine-3'-phosphate
  modified_base 4: mod_base = OTHER; note = 2'-deoxy-2'-fluorocytidine-3'-phosphate
  modified_base 5: mod_base = OTHER; note = 2'-deoxy-2'-fluorocytidine-3'-phosphate
  modified_base 6: mod_base = OTHER; note = 2'-deoxy-2'-fluorocytidine-3'-phosphate
  modified_base 7: mod_base = OTHER; note = guanosine-3'-phosphate
  modified_base 8: mod_base = OTHER; note = guanosine-3'-phosphate
  modified_base 9: mod_base = OTHER; note = 2'-deoxy-2'-fluorocytidine-3'-phosphate
  modified_base 10: mod_base = OTHER; note = 2'-deoxy-2'-fluorocytidine-3'-phosphate
  modified_base 11: mod_base = OTHER; note = guanosine-3'-phosphate
  modified_base 12: mod_base = OTHER; note = 2'-deoxy-2'-fluorocytidine-3'-phosphate
  modified_base 13: mod_base = OTHER; note = 2'-deoxy-2'-fluorouridine-3'-phosphate
  modified_base 14: mod_base = OTHER; note = guanosine-3'-phosphate
  modified_base 15: mod_base = OTHER; note = adenosine-3'-phosphate
  modified_base 16: mod_base = OTHER; note = 2'-deoxy-2'-fluorocytidine-3'-phosphate
  modified_base 17: mod_base = OTHER; note = 2'-deoxy-2'-fluorocytidine-3'-phosphate
  modified_base 18: mod_base = OTHER; note = adenosine-3'-phosphate
  modified_base 19: mod_base = OTHER; note = 2'-deoxy-2'-fluorocytidine-3'-phosphate
  modified_base 20: mod_base = OTHER; note = 2'-deoxythymidine-3'-phosphorothioate
  misc_feature 1..19: note = RNA
  misc_feature 20..21: note = DNA
catcccggccgctgaccactt

SEQ ID NO: 695 - DNA, 21 bp, synthetic construct
  source 1..21: mol_type = other DNA
  modified_base 1: mod_base = OTHER; note = guanosine-3'-phosphate
  modified_base 2: mod_base = OTHER; note = 2'-O-methyluridine-3'-phosphate
  modified_base 3: mod_base = OTHER; note = guanosine-3'-phosphate
  modified_base 4: mod_base = OTHER; note = 2'-O-methylguanosine-3'-phosphate
  modified_base 5: mod_base = OTHER; note = uridine-3'-phosphate
  modified_base 6: mod_base = OTHER; note = 2'-O-methylcytidine-3'-phosphate
  modified_base 7: mod_base = OTHER; note = adenosine-3'-phosphate
  modified_base 8: mod_base = OTHER; note = 2'-O-methylguanosine-3'-phosphate
  modified_base 9: mod_base = OTHER; note = cytidine-3'-phosphate
  modified_base 10: mod_base = OTHER; note = 2'-O-methylguanosine-3'-phosphate
  modified_base 11: mod_base = OTHER; note = guanosine-3'-phosphate
  modified_base 12: mod_base = OTHER; note = 2'-O-methylcytidine-3'-phosphate
  modified_base 13: mod_base = OTHER; note = cytidine-3'-phosphate
  modified_base 14: mod_base = OTHER; note = 2'-O-methylguanosine-3'-phosphate
  modified_base 15: mod_base = OTHER; note = guanosine-3'-phosphate
  modified_base 16: mod_base = OTHER; note = 2'-O-methylguanosine-3'-phosphate
  modified_base 17: mod_base = OTHER; note = adenosine-3'-phosphate
  modified_base 18: mod_base = OTHER; note = 2'-O-methyluridine-3'-phosphate
  modified_base 19: mod_base = OTHER; note = guanosine-3'-phosphate
  modified_base 20: mod_base = OTHER; note = 2'-deoxythymidine-3'-phosphorothioate
  misc_feature 1..19: note = RNA
  misc_feature 20..21: note = DNA
gtggtcagcggccgggatgtt

SEQ ID NO: 696 - DNA, 21 bp, synthetic construct
  source 1..21: mol_type = other DNA
  modified_base 1: mod_base = OTHER; note = 2'-O-methylcytidine-3'-phosphate 5'phosphate
  modified_base 2: mod_base = OTHER; note = 2'-deoxy-2'-fluoroadenosine-3'-phosphate
  modified_base 3: mod_base = OTHER; note = 2'-O-methyluridine-3'-phosphate
  modified_base 4: mod_base = OTHER; note = 2'-deoxy-2'-fluorocytidine-3'-phosphate
  modified_base 5: mod_base = OTHER; note = 2'-O-methylcytidine-3'-phosphate
  modified_base 6: mod_base = OTHER; note = 2'-deoxy-2'-fluorocytidine-3'-phosphate
  modified_base 7: mod_base = OTHER; note = 2'-O-methylguanosine-3'-phosphate
  modified_base 8: mod_base = OTHER; note = 2'-deoxy-2'-fluoroguanosine-3'-phosphate
  modified_base 9: mod_base = OTHER; note = 2'-O-methylcytidine-3'-phosphate
  modified_base 10: mod_base = OTHER; note = 2'-deoxy-2'-fluorocytidine-3'-phosphate
  modified_base 11: mod_base = OTHER; note = 2'-O-methylguanosine-3'-phosphate
  modified_base 12: mod_base = OTHER; note = 2'-deoxy-2'-fluorocytidine-3'-phosphate
  modified_base 13: mod_base = OTHER; note = 2'-O-methyluridine-3'-phosphate
  modified_base 14: mod_base = OTHER; note = 2'-deoxy-2'-fluoroguanosine-3'-phosphate
  modified_base 15: mod_base = OTHER; note = 2'-O-methyladenosine-3'-phosphate
  modified_base 16: mod_base = OTHER; note = 2'-deoxy-2'-fluorocytidine-3'-phosphate
  modified_base 17: mod_base = OTHER; note = 2'-O-methylcytidine-3'-phosphate
  modified_base 18: mod_base = OTHER; note = 2'-deoxy-2'-fluoroadenosine-3'-phosphate
  modified_base 19: mod_base = OTHER; note = 2'-O-methylcytidine-3'-phosphate
  modified_base 20: mod_base = OTHER; note = 2'-deoxythymidine-3'-phosphorothioate
  misc_feature 1..19: note = RNA
  misc_feature 20..21: note = DNA
catcccggccgctgaccactt

SEQ ID NO: 697 - DNA, 21 bp, synthetic construct
  source 1..21: mol_type = other DNA
  modified_base 1: mod_base = OTHER; note = guanosine-3'-phosphate
  modified_base 2: mod_base = OTHER; note = 2'-O-methyluridine-3'-phosphate
  modified_base 3: mod_base = OTHER; note = guanosine-3'-phosphate
  modified_base 4: mod_base = OTHER; note = 2'-O-methylguanosine-3'-phosphate
  modified_base 5: mod_base = OTHER; note = uridine-3'-phosphate
  modified_base 6: mod_base = OTHER; note = 2'-O-methylcytidine-3'-phosphate
  modified_base 7: mod_base = OTHER; note = adenosine-3'-phosphate
  modified_base 8: mod_base = OTHER; note = 2'-O-methylguanosine-3'-phosphate
  modified_base 9: mod_base = OTHER; note = cytidine-3'-phosphate
  modified_base 10: mod_base = OTHER; note = 2'-O-methylguanosine-3'-phosphate
  modified_base 11: mod_base = OTHER; note = guanosine-3'-phosphate
  modified_base 12: mod_base = OTHER; note = 2'-O-methylcytidine-3'-phosphate
  modified_base 13: mod_base = OTHER; note = cytidine-3'-phosphate
  modified_base 14: mod_base = OTHER; note = 2'-O-methylguanosine-3'-phosphate
  modified_base 15: mod_base = OTHER; note = guanosine-3'-phosphate
  modified_base 16: mod_base = OTHER; note = 2'-O-methylguanosine-3'-phosphate
  modified_base 17: mod_base = OTHER; note = adenosine-3'-phosphate
  modified_base 18: mod_base = OTHER; note = 2'-O-methyluridine-3'-phosphate
  modified_base 19: mod_base = OTHER; note = guanosine-3'-phosphate
  modified_base 20: mod_base = OTHER; note = 2'-deoxythymidine-3'-phosphorothioate
  misc_feature 1..19: note = RNA
  misc_feature 20..21: note = DNA
gtggtcagcggccgggatgtt

SEQ ID NO: 698 - DNA, 21 bp, synthetic construct
  source 1..21: mol_type = other DNA
  modified_base 1: mod_base = OTHER; note = 2'-deoxy-2'-fluorocytidine-3'-phosphate
  modified_base 2: mod_base = OTHER; note = adenosine-3'-phosphate
  modified_base 3: mod_base = OTHER; note = 2'-deoxy-2'-fluorouridine-3'-phosphate
  modified_base 4: mod_base = OTHER; note = 2'-deoxy-2'-fluorocytidine-3'-phosphate
  modified_base 5: mod_base = OTHER; note = 2'-deoxy-2'-fluorocytidine-3'-phosphate
  modified_base 6: mod_base = OTHER; note = 2'-deoxy-2'-fluorocytidine-3'-phosphate
  modified_base 7: mod_base = OTHER; note = guanosine-3'-phosphate
  modified_base 8: mod_base = OTHER; note = guanosine-3'-phosphate
  modified_base 9: mod_base = OTHER; note = 2'-deoxy-2'-fluorocytidine-3'-phosphate
  modified_base 10: mod_base = OTHER; note = 2'-deoxy-2'-fluorocytidine-3'-phosphate
  modified_base 11: mod_base = OTHER; note = guanosine-3'-phosphate
  modified_base 12: mod_base = OTHER; note = 2'-deoxy-2'-fluorocytidine-3'-phosphate
  modified_base 13: mod_base = OTHER; note = 2'-deoxy-2'-fluorouridine-3'-phosphate
  modified_base 14: mod_base = OTHER; note = guanosine-3'-phosphate
  modified_base 15: mod_base = OTHER; note = adenosine-3'-phosphate
  modified_base 16: mod_base = OTHER; note = 2'-deoxy-2'-fluorocytidine-3'-phosphate
  modified_base 17: mod_base = OTHER; note = 2'-deoxy-2'-fluorocytidine-3'-phosphate
  modified_base 18: mod_base = OTHER; note = adenosine-3'-phosphate
  modified_base 19: mod_base = OTHER; note = 2'-deoxy-2'-fluorocytidine-3'-phosphate
  modified_base 20: mod_base = OTHER; note = 2'-deoxythymidine-3'-phosphorothioate
  misc_feature 1..19: note = RNA
  misc_feature 20..21: note = DNA
catcccggccgctgaccactt

SEQ ID NO: 699 - DNA, 21 bp, synthetic construct
  source 1..21: mol_type = other DNA
  modified_base 1: mod_base = OTHER; note = 2'-deoxy-2'-fluoroguanosine-3'-phosphate
  modified_base 2: mod_base = OTHER; note = 2'-O-methyluridine-3'-phosphate
  modified_base 3: mod_base = OTHER; note = 2'-deoxy-2'-fluoroguanosine-3'-phosphate
  modified_base 4: mod_base = OTHER; note = 2'-O-methylguanosine-3'-phosphate
  modified_base 5: mod_base = OTHER; note = 2'-deoxy-2'-fluorouridine-3'-phosphate
  modified_base 6: mod_base = OTHER; note = 2'-O-methylcytidine-3'-phosphate
  modified_base 7: mod_base = OTHER; note = 2'-deoxy-2'-fluoroadenosine-3'-phosphate
  modified_base 8: mod_base = OTHER; note = 2'-O-methylguanosine-3'-phosphate
  modified_base 9: mod_base = OTHER; note = 2'-deoxy-2'-fluorocytidine-3'-phosphate
  modified_base 10: mod_base = OTHER; note = 2'-O-methylguanosine-3'-phosphate
  modified_base 11: mod_base = OTHER; note = 2'-deoxy-2'-fluoroguanosine-3'-phosphate
  modified_base 12: mod_base = OTHER; note = 2'-O-methylcytidine-3'-phosphate
  modified_base 13: mod_base = OTHER; note = 2'-deoxy-2'-fluorocytidine-3'-phosphate
  modified_base 14: mod_base = OTHER; note = 2'-O-methylguanosine-3'-phosphate
  modified_base 15: mod_base = OTHER; note = 2'-deoxy-2'-fluoroguanosine-3'-phosphate
  modified_base 16: mod_base = OTHER; note = 2'-O-methylguanosine-3'-phosphate
  modified_base 17: mod_base = OTHER; note = 2'-deoxy-2'-fluoroadenosine-3'-phosphate
  modified_base 18: mod_base = OTHER; note = 2'-O-methyluridine-3'-phosphate
  modified_base 19: mod_base = OTHER; note = 2'-deoxy-2'-fluoroguanosine-3'-phosphate
  modified_base 20: mod_base = OTHER; note = 2'-deoxythymidine-3'-phosphorothioate
  misc_feature 1..19: note = RNA
  misc_feature 20..21: note = DNA
gtggtcagcggccgggatgtt

SEQ ID NO: 700 - DNA, 21 bp, synthetic construct
  source 1..21: mol_type = other DNA
  modified_base 1: mod_base = OTHER; note = cytidine-3'-phosphate
  modified_base 2: mod_base = OTHER; note = adenosine-3'-phosphate
  modified_base 3: mod_base = OTHER; note = uridine-3'-phosphate
  modified_base 4: mod_base = OTHER; note = cytidine-3'-phosphate
  modified_base 5: mod_base = OTHER; note = cytidine-3'-phosphate
  modified_base 6: mod_base = OTHER; note = 2'-O-methylcytidine-3'-phosphate
  modified_base 7: mod_base = OTHER; note = 2'-O-methylguanosine-3'-phosphate
  modified_base 8: mod_base = OTHER; note = guanosine-3'-phosphate
  modified_base 9: mod_base = OTHER; note = cytidine-3'-phosphate
  modified_base 10: mod_base = OTHER; note = 2'-O-methylcytidine-3'-phosphate
  modified_base 11: mod_base = OTHER; note = 2'-O-methylguanosine-3'-phosphate
  modified_base 12: mod_base = OTHER; note = cytidine-3'-phosphate
  modified_base 13: mod_base = OTHER; note = uridine-3'-phosphate
  modified_base 14: mod_base = OTHER; note = guanosine-3'-phosphate
  modified_base 15: mod_base = OTHER; note = adenosine-3'-phosphate
  modified_base 16: mod_base = OTHER; note = cytidine-3'-phosphate
  modified_base 17: mod_base = OTHER; note = 2'-O-methylcytidine-3'-phosphate
  modified_base 18: mod_base = OTHER; note = 2'-O-methyladenosine-3'-phosphate
  modified_base 19: mod_base = OTHER; note = 2'-O-methylcytidine-3'-phosphate
  modified_base 20: mod_base = OTHER; note = 2'-deoxythymidine-3'-phosphorothioate
  misc_feature 1..19: note = RNA
  misc_feature 20..21: note = DNA
catcccggccgctgaccactt

SEQ ID NO: 701 - DNA, 21 bp, synthetic construct
  source 1..21: mol_type = other DNA
  modified_base 1: mod_base = OTHER; note = guanosine-3'-phosphate
  modified_base 2: mod_base = OTHER; note = 2'-deoxy-2'-fluorouridine-3'-phosphate
  modified_base 3: mod_base = OTHER; note = guanosine-3'-phosphate
  modified_base 4: mod_base = OTHER; note = guanosine-3'-phosphate
  modified_base 5: mod_base = OTHER; note = 2'-deoxy-2'-fluorouridine-3'-phosphate
  modified_base 6: mod_base = OTHER; note = 2'-deoxy-2'-fluorocytidine-3'-phosphate
  modified_base 7: mod_base = OTHER; note = adenosine-3'-phosphate
  modified_base 8: mod_base = OTHER; note = guanosine-3'-phosphate
  modified_base 9: mod_base = OTHER; note = 2'-deoxy-2'-fluorocytidine-3'-phosphate
  modified_base 10: mod_base = OTHER; note = guanosine-3'-phosphate
  modified_base 11: mod_base = OTHER; note = guanosine-3'-phosphate
  modified_base 12: mod_base = OTHER; note = 2'-deoxy-2'-fluorocytidine-3'-phosphate
  modified_base 13: mod_base = OTHER; note = 2'-deoxy-2'-fluorocytidine-3'-phosphate
  modified_base 14: mod_base = OTHER; note = guanosine-3'-phosphate
  modified_base 15: mod_base = OTHER; note = guanosine-3'-phosphate
  modified_base 16: mod_base = OTHER; note = guanosine-3'-phosphate
  modified_base 17: mod_base = OTHER; note = adenosine-3'-phosphate
  modified_base 18: mod_base = OTHER; note = 2'-deoxy-2'-fluorouridine-3'-phosphate
  modified_base 19: mod_base = OTHER; note = guanosine-3'-phosphate
  modified_base 20: mod_base = OTHER; note = 2'-deoxythymidine-3'-phosphorothioate
  misc_feature 1..19: note = RNA
  misc_feature 20..21: note = DNA
gtggtcagcggccgggatgtt

SEQ ID NO: 702 - DNA, 21 bp, synthetic construct
  source 1..21: mol_type = other DNA
  modified_base 1: mod_base = OTHER; note = cytidine-3'-phosphate
  modified_base 2: mod_base = OTHER; note = adenosine-3'-phosphate
  modified_base 3: mod_base = OTHER; note = uridine-3'-phosphate
  modified_base 4: mod_base = OTHER; note = cytidine-3'-phosphate
  modified_base 5: mod_base = OTHER; note = cytidine-3'-phosphate
  modified_base 6: mod_base = OTHER; note = 2'-O-methylcytidine-3'-phosphate
  modified_base 7: mod_base = OTHER; note = 2'-O-methylguanosine-3'-phosphate
  modified_base 8: mod_base = OTHER; note = guanosine-3'-phosphate
  modified_base 9: mod_base = OTHER; note = cytidine-3'-phosphate
  modified_base 10: mod_base = OTHER; note = 2'-O-methylcytidine-3'-phosphate
  modified_base 11: mod_base = OTHER; note = 2'-O-methylguanosine-3'-phosphate
  modified_base 12: mod_base = OTHER; note = cytidine-3'-phosphate
  modified_base 13: mod_base = OTHER; note = uridine-3'-phosphate
  modified_base 14: mod_base = OTHER; note = guanosine-3'-phosphate
  modified_base 15: mod_base = OTHER; note = adenosine-3'-phosphate
  modified_base 16: mod_base = OTHER; note = cytidine-3'-phosphate
  modified_base 17: mod_base = OTHER; note = 2'-O-methylcytidine-3'-phosphate
  modified_base 18: mod_base = OTHER; note = 2'-O-methyladenosine-3'-phosphate
  modified_base 19: mod_base = OTHER; note = 2'-O-methylcytidine-3'-phosphate
  modified_base 20: mod_base = OTHER; note = 2'-deoxythymidine-3'-phosphorothioate
  misc_feature 1..19: note = RNA
  misc_feature 20..21: note = DNA
catcccggccgctgaccactt

SEQ ID NO: 703 - DNA, 21 bp, synthetic construct
  source 1..21: mol_type = other DNA
  modified_base 1: mod_base = OTHER; note = guanosine-3'-phosphate
  modified_base 2: mod_base = OTHER; note = 2'-O-methyluridine-3'-phosphate
  modified_base 3: mod_base = OTHER; note = guanosine-3'-phosphate
  modified_base 4: mod_base = OTHER; note = 2'-O-methylguanosine-3'-phosphate
  modified_base 5: mod_base = OTHER; note = uridine-3'-phosphate
  modified_base 6: mod_base = OTHER; note = 2'-O-methylcytidine-3'-phosphate
  modified_base 7: mod_base = OTHER; note = adenosine-3'-phosphate
  modified_base 8: mod_base = OTHER; note = 2'-O-methylguanosine-3'-phosphate
  modified_base 9: mod_base = OTHER; note = cytidine-3'-phosphate
  modified_base 10: mod_base = OTHER; note = 2'-O-methylguanosine-3'-phosphate
  modified_base 11: mod_base = OTHER; note = guanosine-3'-phosphate
  modified_base 12: mod_base = OTHER; note = 2'-O-methylcytidine-3'-phosphate
  modified_base 13: mod_base = OTHER; note = cytidine-3'-phosphate
  modified_base 14: mod_base = OTHER; note = 2'-O-methylguanosine-3'-phosphate
  modified_base 15: mod_base = OTHER; note = guanosine-3'-phosphate
  modified_base 16: mod_base = OTHER; note = 2'-O-methylguanosine-3'-phosphate
  modified_base 17: mod_base = OTHER; note = adenosine-3'-phosphate
  modified_base 18: mod_base = OTHER; note = 2'-O-methyluridine-3'-phosphate
  modified_base 19: mod_base = OTHER; note = guanosine-3'-phosphate
  modified_base 20: mod_base = OTHER; note = 2'-deoxythymidine-3'-phosphorothioate
  misc_feature 1..19: note = RNA
  misc_feature 20..21: note = DNA
gtggtcagcggccgggatgtt

SEQ ID NO: 704 - DNA, 21 bp, synthetic construct
  source 1..21: mol_type = other DNA
  modified_base 1: mod_base = OTHER; note = cytidine-3'-phosphate
  modified_base 2: mod_base = OTHER; note = adenosine-3'-phosphate
  modified_base 3: mod_base = OTHER; note = uridine-3'-phosphate
  modified_base 4: mod_base = OTHER; note = cytidine-3'-phosphate
  modified_base 5: mod_base = OTHER; note = cytidine-3'-phosphate
  modified_base 6: mod_base = OTHER; note = 2'-O-methylcytidine-3'-phosphate
  modified_base 7: mod_base = OTHER; note = 2'-O-methylguanosine-3'-phosphate
  modified_base 8: mod_base = OTHER; note = guanosine-3'-phosphate
  modified_base 9: mod_base = OTHER; note = cytidine-3'-phosphate
  modified_base 10: mod_base = OTHER; note = 2'-O-methylcytidine-3'-phosphate
  modified_base 11: mod_base = OTHER; note = 2'-O-methylguanosine-3'-phosphate
  modified_base 12: mod_base = OTHER; note = cytidine-3'-phosphate
  modified_base 13: mod_base = OTHER; note = uridine-3'-phosphate
  modified_base 14: mod_base = OTHER; note = guanosine-3'-phosphate
  modified_base 15: mod_base = OTHER; note = adenosine-3'-phosphate
  modified_base 16: mod_base = OTHER; note = cytidine-3'-phosphate
  modified_base 17: mod_base = OTHER; note = 2'-O-methylcytidine-3'-phosphate
  modified_base 18: mod_base = OTHER; note = 2'-O-methyladenosine-3'-phosphate
  modified_base 19: mod_base = OTHER; note = 2'-O-methylcytidine-3'-phosphate
  modified_base 20: mod_base = OTHER; note = 2'-deoxythymidine-3'-phosphorothioate
  misc_feature 1..19: note = RNA
  misc_feature 20..21: note = DNA
catcccggccgctgaccactt

SEQ ID NO: 705 - DNA, 21 bp, synthetic construct
  source 1..21: mol_type = other DNA
  modified_base 1: mod_base = OTHER; note = guanosine-3'-phosphate
  modified_base 2: mod_base = OTHER; note = guanosine-3'-phosphate
  modified_base 3: mod_base = OTHER; note = cytidine-3'-phosphate
  modified_base 4: mod_base = OTHER; note = cytidine-3'-phosphate
  modified_base 5: mod_base = OTHER; note = adenosine-3'-phosphate
  modified_base 6: mod_base = OTHER; note = cytidine-3'-phosphate
  modified_base 7: mod_base = OTHER; note = guanosine-3'-phosphate
  modified_base 8: mod_base = OTHER; note = adenosine-3'-phosphate
  modified_base 9: mod_base = OTHER; note = guanosine-3'-phosphate
  modified_base 10: mod_base = OTHER; note = guanosine-3'-phosphate
  modified_base 11: mod_base = OTHER; note = uridine-3'-phosphate
  modified_base 12: mod_base = OTHER; note = cytidine-3'-phosphate
  modified_base 13: mod_base = OTHER; note = adenosine-3'-phosphate
  modified_base 14: mod_base = OTHER; note = guanosine-3'-phosphate
  modified_base 15: mod_base = OTHER; note = cytidine-3'-phosphate
  modified_base 16: mod_base = OTHER; note = cytidine-3'-phosphate
  modified_base 17: mod_base = OTHER; note = cytidine-3'-phosphate
  modified_base 18: mod_base = OTHER; note = adenosine-3'-phosphate
  modified_base 19: mod_base = OTHER; note = adenosine-3'-phosphate
  misc_feature 1..19: note = RNA
  misc_feature 20..21: note = DNA
ggccacgaggtcagcccaatt

SEQ ID NO: 706 - DNA, 21 bp, synthetic construct
  source 1..21: mol_type = other DNA
  modified_base 1: mod_base = OTHER; note = uridine-3'-phosphate
  modified_base 2: mod_base = OTHER; note = uridine-3'-phosphate
  modified_base 3: mod_base = OTHER; note = guanosine-3'-phosphate
  modified_base 4: mod_base = OTHER; note = guanosine-3'-phosphate
  modified_base 5: mod_base = OTHER; note = guanosine-3'-phosphate
  modified_base 6: mod_base = OTHER; note = cytidine-3'-phosphate
  modified_base 7: mod_base = OTHER; note = uridine-3'-phosphate
  modified_base 8: mod_base = OTHER; note = guanosine-3'-phosphate
  modified_base 9: mod_base = OTHER; note = adenosine-3'-phosphate
  modified_base 10: mod_base = OTHER; note = cytidine-3'-phosphate
  modified_base 11: mod_base = OTHER; note = cytidine-3'-phosphate
  modified_base 12: mod_base = OTHER; note = uridine-3'-phosphate
  modified_base 13: mod_base = OTHER; note = cytidine-3'-phosphate
  modified_base 14: mod_base = OTHER; note = guanosine-3'-phosphate
  modified_base 15: mod_base = OTHER; note = uridine-3'-phosphate
  modified_base 16: mod_base = OTHER; note = guanosine-3'-phosphate
  modified_base 17: mod_base = OTHER; note = guanosine-3'-phosphate
  modified_base 18: mod_base = OTHER; note = cytidine-3'-phosphate
  modified_base 19: mod_base = OTHER; note = cytidine-3'-phosphate
  misc_feature 1..19: note = RNA
  misc_feature 20..21: note = DNA
ttgggctgacctcgtggcctt

SEQ ID NO: 707 - DNA, 21 bp, synthetic construct
  source 1..21: mol_type = other DNA
  modified_base 1: mod_base = OTHER; note = cytidine-3'-phosphate
  modified_base 2: mod_base = OTHER; note = guanosine-3'-phosphate
  modified_base 3: mod_base = OTHER; note = adenosine-3'-phosphate
  modified_base 4: mod_base = OTHER; note = guanosine-3'-phosphate
  modified_base 5: mod_base = OTHER; note = guanosine-3'-phosphate
  modified_base 6: mod_base = OTHER; note = uridine-3'-phosphate
  modified_base 7: mod_base = OTHER; note = cytidine-3'-phosphate
  modified_base 8: mod_base = OTHER; note = adenosine-3'-phosphate
  modified_base 9: mod_base = OTHER; note = guanosine-3'-phosphate
  modified_base 10: mod_base = OTHER; note = cytidine-3'-phosphate
  modified_base 11: mod_base = OTHER; note = cytidine-3'-phosphate
  modified_base 12: mod_base = OTHER; note = cytidine-3'-phosphate
  modified_base 13: mod_base = OTHER; note = adenosine-3'-phosphate
  modified_base 14: mod_base = OTHER; note = adenosine-3'-phosphate
  modified_base 15: mod_base = OTHER; note = cytidine-3'-phosphate
  modified_base 16: mod_base = OTHER; note = cytidine-3'-phosphate
  modified_base 17: mod_base = OTHER; note = adenosine-3'-phosphate
  modified_base 18: mod_base = OTHER; note = guanosine-3'-phosphate
  modified_base 19: mod_base = OTHER; note = uridine-3'-phosphate
  misc_feature 1..19: note = RNA
  misc_feature 20..21: note = DNA
cgaggtcagcccaaccagttt

SEQ ID NO: 708 - DNA, 21 bp, synthetic construct
  source 1..21: mol_type = other DNA
  modified_base 1: mod_base = OTHER; note = adenosine-3'-phosphate
  modified_base 2: mod_base = OTHER; note = cytidine-3'-phosphate
  modified_base 3: mod_base = OTHER; note = uridine-3'-phosphate
  modified_base 4: mod_base = OTHER; note = guanosine-3'-phosphate
  modified_base 5: mod_base = OTHER; note = guanosine-3'-phosphate
  modified_base 6: mod_base = OTHER; note = uridine-3'-phosphate
  modified_base 7: mod_base = OTHER; note = uridine-3'-phosphate
  modified_base 8: mod_base = OTHER; note = guanosine-3'-phosphate
  modified_base 9: mod_base = OTHER; note = guanosine-3'-phosphate
  modified_base 10: mod_base = OTHER; note = guanosine-3'-phosphate
  modified_base 11: mod_base = OTHER; note = cytidine-3'-phosphate
  modified_base 12: mod_base = OTHER; note = uridine-3'-phosphate
  modified_base 13: mod_base = OTHER; note = guanosine-3'-phosphate
  modified_base 14: mod_base = OTHER; note = adenosine-3'-phosphate
  modified_base 15: mod_base = OTHER; note = cytidine-3'-phosphate
  modified_base 16: mod_base = OTHER; note = cytidine-3'-phosphate
  modified_base 17: mod_base = OTHER; note = uridine-3'-phosphate
  modified_base 18: mod_base = OTHER; note = cytidine-3'-phosphate
  modified_base 19: mod_base = OTHER; note = guanosine-3'-phosphate
  misc_feature 1..19: note = RNA
  misc_feature 20..21: note = DNA
actggttgggctgacctcgtt

SEQ ID NO: 709 - DNA, 21 bp, synthetic construct
  source 1..21: mol_type = other DNA
  modified_base 1: mod_base = OTHER; note = guanosine-3'-phosphate
  modified_base 2: mod_base = OTHER; note = uridine-3'-phosphate
  modified_base 3: mod_base = OTHER; note = cytidine-3'-phosphate
  modified_base 4: mod_base = OTHER; note = adenosine-3'-phosphate
  modified_base 5: mod_base = OTHER; note = guanosine-3'-phosphate
  modified_base 6: mod_base = OTHER; note = cytidine-3'-phosphate
  modified_base 7: mod_base = OTHER; note = cytidine-3'-phosphate
  modified_base 8: mod_base = OTHER; note = cytidine-3'-phosphate
  modified_base 9: mod_base = OTHER; note = adenosine-3'-phosphate
  modified_base 10: mod_base = OTHER; note = adenosine-3'-phosphate
  modified_base 11: mod_base = OTHER; note = cytidine-3'-phosphate
  modified_base 12: mod_base = OTHER; note = cytidine-3'-phosphate
  modified_base 13: mod_base = OTHER; note = adenosine-3'-phosphate
  modified_base 14: mod_base = OTHER; note = guanosine-3'-phosphate
  modified_base 15: mod_base = OTHER; note = uridine-3'-phosphate
  modified_base 16: mod_base = OTHER; note = guanosine-3'-phosphate
  modified_base 17: mod_base = OTHER; note = cytidine-3'-phosphate
  modified_base 18: mod_base = OTHER; note = guanosine-3'-phosphate
  modified_base 19: mod_base = OTHER; note = uridine-3'-phosphate
  misc_feature 1..19: note = RNA
  misc_feature 20..21: note = DNA
gtcagcccaaccagtgcgttt

SEQ ID NO: 710 - DNA, 21 bp, synthetic construct
  source 1..21: mol_type = other DNA
  modified_base 1: mod_base = OTHER; note = adenosine-3'-phosphate
  modified_base 2: mod_base = OTHER; note = cytidine-3'-phosphate
  modified_base 3: mod_base = OTHER; note = guanosine-3'-phosphate
  modified_base 4: mod_base = OTHER; note = cytidine-3'-phosphate
  modified_base 5: mod_base = OTHER; note = adenosine-3'-phosphate
  modified_base 6: mod_base = OTHER; note = cytidine-3'-phosphate
  modified_base 7: mod_base = OTHER; note = uridine-3'-phosphate
  modified_base 8: mod_base = OTHER; note = guanosine-3'-phosphate
  modified_base 9: mod_base = OTHER; note = guanosine-3'-phosphate
  modified_base 10: mod_base = OTHER; note = uridine-3'-phosphate
  modified_base 11: mod_base = OTHER; note = uridine-3'-phosphate
  modified_base 12: mod_base = OTHER; note = guanosine-3'-phosphate
  modified_base 13: mod_base = OTHER; note = guanosine-3'-phosphate
  modified_base 14: mod_base = OTHER; note = guanosine-3'-phosphate
  modified_base 15: mod_base = OTHER; note = cytidine-3'-phosphate
  modified_base 16: mod_base = OTHER; note = uridine-3'-phosphate
  modified_base 17: mod_base = OTHER; note = guanosine-3'-phosphate
  modified_base 18: mod_base = OTHER; note = adenosine-3'-phosphate
  modified_base 19: mod_base = OTHER; note = cytidine-3'-phosphate
  misc_feature 1..19: note = RNA
  misc_feature 20..21: note = DNA
acgcactggttgggctgactt

SEQ ID NO: 711 - DNA, 21 bp, synthetic construct
  source 1..21: mol_type = other DNA
  modified_base 1: mod_base = OTHER; note = cytidine-3'-phosphate
  modified_base 2: mod_base = OTHER; note = adenosine-3'-phosphate
  modified_base 3: mod_base = OTHER; note = guanosine-3'-phosphate
  modified_base 4: mod_base = OTHER; note = cytidine-3'-phosphate
  modified_base 5: mod_base = OTHER; note = cytidine-3'-phosphate
  modified_base 6: mod_base = OTHER; note = cytidine-3'-phosphate
  modified_base 7: mod_base = OTHER; note = adenosine-3'-phosphate
  modified_base 8: mod_base = OTHER; note = adenosine-3'-phosphate
  modified_base 9: mod_base = OTHER; note = cytidine-3'-phosphate
  modified_base 10: mod_base = OTHER; note = cytidine-3'-phosphate
  modified_base 11: mod_base = OTHER; note = adenosine-3'-phosphate
  modified_base 12: mod_base = OTHER; note = guanosine-3'-phosphate
  modified_base 13: mod_base = OTHER; note = uridine-3'-phosphate
  modified_base 14: mod_base = OTHER; note = guanosine-3'-phosphate
  modified_base 15: mod_base = OTHER; note = cytidine-3'-phosphate
  modified_base 16: mod_base = OTHER; note = guanosine-3'-phosphate
  modified_base 17: mod_base = OTHER; note = uridine-3'-phosphate
  modified_base 18: mod_base = OTHER; note = guanosine-3'-phosphate
  modified_base 19: mod_base = OTHER; note = guanosine-3'-phosphate
  misc_feature 1..19: note = RNA
  misc_feature 20..21: note = DNA
cagcccaaccagtgcgtggtt

SEQ ID NO: 712 - DNA, 21 bp, synthetic construct
  source 1..21: mol_type = other DNA
  modified_base 1: mod_base = OTHER; note = cytidine-3'-phosphate
  modified_base 2: mod_base = OTHER; note = cytidine-3'-phosphate
  modified_base 3: mod_base = OTHER; note = adenosine-3'-phosphate
  modified_base 4: mod_base = OTHER; note = cytidine-3'-phosphate
  modified_base 5: mod_base = OTHER; note = guanosine-3'-phosphate
  modified_base 6: mod_base = OTHER; note = cytidine-3'-phosphate
  modified_base 7: mod_base = OTHER; note = adenosine-3'-phosphate
  modified_base 8: mod_base = OTHER; note = cytidine-3'-phosphate
  modified_base 9: mod_base = OTHER; note = uridine-3'-phosphate
  modified_base 10: mod_base = OTHER; note = guanosine-3'-phosphate
  modified_base 11: mod_base = OTHER; note = guanosine-3'-phosphate
  modified_base 12: mod_base = OTHER; note = uridine-3'-phosphate
  modified_base 13: mod_base = OTHER; note = uridine-3'-phosphate
  modified_base 14: mod_base = OTHER; note = guanosine-3'-phosphate
  modified_base 15: mod_base = OTHER; note = guanosine-3'-phosphate
  modified_base 16: mod_base = OTHER; note = guanosine-3'-phosphate
  modified_base 17: mod_base = OTHER; note = cytidine-3'-phosphate
  modified_base 18: mod_base = OTHER; note = uridine-3'-phosphate
  modified_base 19: mod_base = OTHER; note = guanosine-3'-phosphate
  misc_feature 1..19: note = RNA
  misc_feature 20..21: note = DNA
ccacgcactggttgggctgtt

SEQ ID NO: 713 - DNA, 21 bp, synthetic construct
  source 1..21: mol_type = other DNA
  modified_base 1: mod_base = OTHER; note = cytidine-3'-phosphate
  modified_base 2: mod_base = OTHER; note = adenosine-3'-phosphate
  modified_base 3: mod_base = OTHER; note = cytidine-3'-phosphate
  modified_base 4: mod_base = OTHER; note = adenosine-3'-phosphate
  modified_base 5: mod_base = OTHER; note = guanosine-3'-phosphate
  modified_base 6: mod_base = OTHER; note = guanosine-3'-phosphate
  modified_base 7: mod_base = OTHER; note = guanosine-3'-phosphate
  modified_base 8: mod_base = OTHER; note = adenosine-3'-phosphate
  modified_base 9: mod_base = OTHER; note = guanosine-3'-phosphate
  modified_base 10: mod_base = OTHER; note = guanosine-3'-phosphate
  modified_base 11: mod_base = OTHER; note = cytidine-3'-phosphate
  modified_base 12: mod_base = OTHER; note = cytidine-3'-phosphate
  modified_base 13: mod_base = OTHER; note = adenosine-3'-phosphate
  modified_base 14: mod_base = OTHER; note = guanosine-3'-phosphate
  modified_base 15: mod_base = OTHER; note = cytidine-3'-phosphate
  modified_base 16: mod_base = OTHER; note = adenosine-3'-phosphate
  modified_base 17: mod_base = OTHER; note = uridine-3'-phosphate
  modified_base 18: mod_base = OTHER; note = cytidine-3'-phosphate
  modified_base 19: mod_base = OTHER; note = cytidine-3'-phosphate
  misc_feature 1..19: note = RNA
  misc_feature 20..21: note = DNA
cacagggaggccagcatcctt

SEQ ID NO: 714 - DNA, 21 bp, synthetic construct
  source 1..21: mol_type = other DNA
  modified_base 1: mod_base = OTHER; note = guanosine-3'-phosphate
  modified_base 2: mod_base = OTHER; note = guanosine-3'-phosphate
  modified_base 3: mod_base = OTHER; note = adenosine-3'-phosphate
  modified_base 4: mod_base = OTHER; note = uridine-3'-phosphate
  modified_base 5: mod_base = OTHER; note = guanosine-3'-phosphate
  modified_base 6: mod_base = OTHER; note = cytidine-3'-phosphate
  modified_base 7: mod_base = OTHER; note = uridine-3'-phosphate
  modified_base 8: mod_base = OTHER; note = guanosine-3'-phosphate
  modified_base 9: mod_base = OTHER; note = guanosine-3'-phosphate
  modified_base 10: mod_base = OTHER; note = cytidine-3'-phosphate
  modified_base 11: mod_base = OTHER; note = cytidine-3'-phosphate
  modified_base 12: mod_base = OTHER; note = uridine-3'-phosphate
  modified_base 13: mod_base = OTHER; note = cytidine-3'-phosphate
  modified_base 14: mod_base = OTHER; note = cytidine-3'-phosphate
  modified_base 15: mod_base = OTHER; note = cytidine-3'-phosphate
  modified_base 16: mod_base = OTHER; note = uridine-3'-phosphate
  modified_base 17: mod_base = OTHER; note = guanosine-3'-phosphate
  modified_base 18: mod_base = OTHER; note = uridine-3'-phosphate
  modified_base 19: mod_base = OTHER; note = guanosine-3'-phosphate
  misc_feature 1..19: note = RNA
  misc_feature 20..21: note = DNA
ggatgctggcctccctgtgtt

SEQ ID NO: 715 - DNA, 21 bp, synthetic construct
  source 1..21: mol_type = other DNA
  modified_base 1: mod_base = OTHER; note = cytidine-3'-phosphate
  modified_base 2: mod_base = OTHER; note = cytidine-3'-phosphate
  modified_base 3: mod_base = OTHER; note = adenosine-3'-phosphate
  modified_base 4: mod_base = OTHER; note = guanosine-3'-phosphate
  modified_base 5: mod_base = OTHER; note = cytidine-3'-phosphate
  modified_base 6: mod_base = OTHER; note = adenosine-3'-phosphate
  modified_base 7: mod_base = OTHER; note = uridine-3'-phosphate
  modified_base 8: mod_base = OTHER; note = cytidine-3'-phosphate
  modified_base 9: mod_base = OTHER; note = cytidine-3'-phosphate
  modified_base 10: mod_base = OTHER; note = adenosine-3'-phosphate
  modified_base 11: mod_base = OTHER; note = cytidine-3'-phosphate
  modified_base 12: mod_base = OTHER; note = guanosine-3'-phosphate
  modified_base 13: mod_base = OTHER; note = cytidine-3'-phosphate
  modified_base 14: mod_base = OTHER; note = uridine-3'-phosphate
  modified_base 15: mod_base = OTHER; note = uridine-3'-phosphate
  modified_base 16: mod_base = OTHER; note = cytidine-3'-phosphate
  modified_base 17: mod_base = OTHER; note = cytidine-3'-phosphate
  modified_base 18: mod_base = OTHER; note = uridine-3'-phosphate
  modified_base 19: mod_base = OTHER; note = guanosine-3'-phosphate
  modified_base 20: mod_base = OTHER; note = 2'-deoxythymidine-3'-phosphorothioate
  misc_feature 1..19: note = RNA
  misc_feature 20..21: note = DNA
ccagcatccacgcttcctgtt

SEQ ID NO: 716 - DNA, 21 bp, synthetic construct
  source 1..21: mol_type = other DNA
  modified_base 1: mod_base = OTHER; note = cytidine-3'-phosphate
  modified_base 2: mod_base = OTHER; note = adenosine-3'-phosphate
  modified_base 3: mod_base = OTHER; note = guanosine-3'-phosphate
  modified_base 4: mod_base = OTHER; note = guanosine-3'-phosphate
  modified_base 5: mod_base = OTHER; note = adenosine-3'-phosphate
  modified_base 6: mod_base = OTHER; note = adenosine-3'-phosphate
  modified_base 7: mod_base = OTHER; note = guanosine-3'-phosphate
  modified_base 8: mod_base = OTHER; note = cytidine-3'-phosphate
  modified_base 9: mod_base = OTHER; note = guanosine-3'-phosphate
  modified_base 10: mod_base = OTHER; note = uridine-3'-phosphate
  modified_base 11: mod_base = OTHER; note = guanosine-3'-phosphate
  modified_base 12: mod_base = OTHER; note = guanosine-3'-phosphate
  modified_base 13: mod_base = OTHER; note = adenosine-3'-phosphate
  modified_base 14: mod_base = OTHER; note = uridine-3'-phosphate
  modified_base 15: mod_base = OTHER; note = guanosine-3'-phosphate
  modified_base 16: mod_base = OTHER; note = cytidine-3'-phosphate
  modified_base 17: mod_base = OTHER; note = uridine-3'-phosphate
  modified_base 18: mod_base = OTHER; note = guanosine-3'-phosphate
  modified_base 19: mod_base = OTHER; note = guanosine-3'-phosphate
  modified_base 20: mod_base = OTHER; note = 2'-deoxythymidine-3'-phosphorothioate
  misc_feature 1..19: note = RNA
  misc_feature 20..21: note = DNA
caggaagcgtggatgctggtt

SEQ ID NO: 717 - DNA, 21 bp, synthetic construct
  source 1..21: mol_type = other DNA
  modified_base 1: mod_base = OTHER; note = 2'-O-methylcytidine-3'-phosphate
  modified_base 2: mod_base = OTHER; note = 2'-O-methylcytidine-3'-phosphate
  modified_base 3: mod_base = OTHER; note = adenosine-3'-phosphate
  modified_base 4: mod_base = OTHER; note = guanosine-3'-phosphate
  modified_base 5: mod_base = OTHER; note = 2'-O-methylcytidine-3'-phosphate
  modified_base 6: mod_base = OTHER; note = adenosine-3'-phosphate
  modified_base 7: mod_base = OTHER; note = 2'-O-methyluridine-3'-phosphate
  modified_base 8: mod_base = OTHER; note = 2'-O-methylcytidine-3'-phosphate
  modified_base 9: mod_base = OTHER; note = 2'-O-methylcytidine-3'-phosphate
  modified_base 10: mod_base = OTHER; note = adenosine-3'-phosphate
  modified_base 11: mod_base = OTHER; note = 2'-O-methylcytidine-3'-phosphate
  modified_base 12: mod_base = OTHER; note = guanosine-3'-phosphate
  modified_base 13: mod_base = OTHER; note = 2'-O-methylcytidine-3'-phosphate
  modified_base 14: mod_base = OTHER; note = 2'-O-methyluridine-3'-phosphate
  modified_base 15: mod_base = OTHER; note = 2'-O-methyluridine-3'-phosphate
  modified_base 16: mod_base = OTHER; note = 2'-O-methylcytidine-3'-phosphate
  modified_base 17: mod_base = OTHER; note = 2'-O-methylcytidine-3'-phosphate
  modified_base 18: mod_base = OTHER; note = 2'-O-methyluridine-3'-phosphate
  modified_base 19: mod_base = OTHER; note = guanosine-3'-phosphate
  modified_base 20: mod_base = OTHER; note = 2'-deoxythymidine-3'-phosphorothioate
  misc_feature 1..19: note = RNA
  misc_feature 20..21: note = DNA
ccagcatccacgcttcctgtt

SEQ ID NO: 718 - DNA, 21 bp, synthetic construct
  source 1..21: mol_type = other DNA
  modified_base 1: mod_base = OTHER; note = 2'-O-methylcytidine-3'-phosphate
  modified_base 2: mod_base = OTHER; note = adenosine-3'-phosphate
  modified_base 3: mod_base = OTHER; note = guanosine-3'-phosphate
  modified_base 4: mod_base = OTHER; note = guanosine-3'-phosphate
  modified_base 5: mod_base = OTHER; note = adenosine-3'-phosphate
  modified_base 6: mod_base = OTHER; note = adenosine-3'-phosphate
  modified_base 7: mod_base = OTHER; note = guanosine-3'-phosphate
  modified_base 8: mod_base = OTHER; note = cytidine-3'-phosphate
  modified_base 9: mod_base = OTHER; note = guanosine-3'-phosphate
  modified_base 10: mod_base = OTHER; note = uridine-3'-phosphate
  modified_base 11: mod_base = OTHER; note = guanosine-3'-phosphate
  modified_base 12: mod_base = OTHER; note = guanosine-3'-phosphate
  modified_base 13: mod_base = OTHER; note = adenosine-3'-phosphate
  modified_base 14: mod_base = OTHER; note = uridine-3'-phosphate
  modified_base 15: mod_base = OTHER; note = guanosine-3'-phosphate
  modified_base 16: mod_base = OTHER; note = cytidine-3'-phosphate
  modified_base 17: mod_base = OTHER; note = uridine-3'-phosphate
  modified_base 18: mod_base = OTHER; note = guanosine-3'-phosphate
  modified_base 19: mod_base = OTHER; note = guanosine-3'-phosphate
  modified_base 20: mod_base = OTHER; note = 2'-deoxythymidine-3'-phosphorothioate
  misc_feature 1..19: note = RNA
  misc_feature 20..21: note = DNA
caggaagcgtggatgctggtt

SEQ ID NO: 719 - DNA, 21 bp, synthetic construct
  source 1..21: mol_type = other DNA
  modified_base 1: mod_base = OTHER; note = adenosine-3'-phosphate
  modified_base 2: mod_base = OTHER; note = guanosine-3'-phosphate
  modified_base 3: mod_base = OTHER; note = uridine-3'-phosphate
  modified_base 4: mod_base = OTHER; note = cytidine-3'-phosphate
  modified_base 5: mod_base = OTHER; note = adenosine-3'-phosphate
  modified_base 6: mod_base = OTHER; note = adenosine-3'-phosphate
  modified_base 7: mod_base = OTHER; note = guanosine-3'-phosphate
  modified_base 8: mod_base = OTHER; note = guanosine-3'-phosphate
  modified_base 9: mod_base = OTHER; note = adenosine-3'-phosphate
  modified_base 10: mod_base = OTHER; note = guanosine-3'-phosphate
  modified_base 11: mod_base = OTHER; note = cytidine-3'-phosphate
  modified_base 12: mod_base = OTHER; note = adenosine-3'-phosphate
  modified_base 13: mod_base = OTHER; note = uridine-3'-phosphate
  modified_base 14: mod_base = OTHER; note = guanosine-3'-phosphate
  modified_base 15: mod_base = OTHER; note = guanosine-3'-phosphate
  modified_base 16: mod_base = OTHER; note = adenosine-3'-phosphate
  modified_base 17: mod_base = OTHER; note = adenosine-3'-phosphate
  modified_base 18: mod_base = OTHER; note = uridine-3'-phosphate
  modified_base 19: mod_base = OTHER; note = cytidine-3'-phosphate
  modified_base 20: mod_base = OTHER; note = 2'-deoxythymidine-3'-phosphorothioate
  misc_feature 1..19: note = RNA
  misc_feature 20..21: note = DNA
agtcaaggagcatggaatctt

SEQ ID NO: 720 - DNA, 21 bp, synthetic construct
  source 1..21: mol_type = other DNA
  modified_base 1: mod_base = OTHER; note = guanosine-3'-phosphate
  modified_base 2: mod_base = OTHER; note = adenosine-3'-phosphate
  modified_base 3: mod_base = OTHER; note = uridine-3'-phosphate
  modified_base 4: mod_base = OTHER; note = uridine-3'-phosphate
  modified_base 5: mod_base = OTHER; note = cytidine-3'-phosphate
  modified_base 6: mod_base = OTHER; note = cytidine-3'-phosphate
  modified_base 7: mod_base = OTHER; note = adenosine-3'-phosphate
  modified_base 8: mod_base = OTHER; note = uridine-3'-phosphate
  modified_base 9: mod_base = OTHER; note = guanosine-3'-phosphate
  modified_base 10: mod_base = OTHER; note = cytidine-3'-phosphate
  modified_base 11: mod_base = OTHER; note = uridine-3'-phosphate
  modified_base 12: mod_base = OTHER; note = cytidine-3'-phosphate
  modified_base 13: mod_base = OTHER; note = cytidine-3'-phosphate
  modified_base 14: mod_base = OTHER; note = uridine-3'-phosphate
  modified_base 15: mod_base = OTHER; note = uridine-3'-phosphate
  modified_base 16: mod_base = OTHER; note = guanosine-3'-phosphate
  modified_base 17: mod_base = OTHER; note = adenosine-3'-phosphate
  modified_base 18: mod_base = OTHER; note = cytidine-3'-phosphate
  modified_base 19: mod_base = OTHER; note = uridine-3'-phosphate
  modified_base 20: mod_base = OTHER; note = 2'-deoxythymidine-3'-phosphorothioate
  misc_feature 1..19: note = RNA
  misc_feature 20..21: note = DNA
gattccatgctccttgacttt

SEQ ID NO: 721 - DNA, 21 bp, synthetic construct
  source 1..21: mol_type = other DNA
  modified_base 1: mod_base = OTHER; note = adenosine-3'-phosphate
  modified_base 2: mod_base = OTHER; note = guanosine-3'-phosphate
  modified_base 3: mod_base = OTHER; note = 2'-O-methyluridine-3'-phosphate
  modified_base 4: mod_base = OTHER; note = 2'-O-methylcytidine-3'-phosphate
  modified_base 5: mod_base = OTHER; note = adenosine-3'-phosphate
  modified_base 6: mod_base = OTHER; note = adenosine-3'-phosphate
  modified_base 7: mod_base = OTHER; note = guanosine-3'-phosphate
  modified_base 8: mod_base = OTHER; note = guanosine-3'-phosphate
  modified_base 9: mod_base = OTHER; note = adenosine-3'-phosphate
  modified_base 10: mod_base = OTHER; note = guanosine-3'-phosphate
  modified_base 11: mod_base = OTHER; note = 2'-O-methylcytidine-3'-phosphate
  modified_base 12: mod_base = OTHER; note = adenosine-3'-phosphate
  modified_base 13: mod_base = OTHER; note = 2'-O-methyluridine-3'-phosphate
  modified_base 14: mod_base = OTHER; note = guanosine-3'-phosphate
  modified_base 15: mod_base = OTHER; note = guanosine-3'-phosphate
  modified_base 16: mod_base = OTHER; note = adenosine-3'-phosphate
  modified_base 17: mod_base = OTHER; note = adenosine-3'-phosphate
  modified_base 18: mod_base = OTHER; note = 2'-O-methyluridine-3'-phosphate
  modified_base 19: mod_base = OTHER; note = 2'-O-methylcytidine-3'-phosphate
  modified_base 20: mod_base = OTHER; note = 2'-deoxythymidine-3'-phosphorothioate
  misc_feature 1..19: note = RNA
  misc_feature 20..21: note = DNA
agtcaaggagcatggaatctt

SEQ ID NO: 722 - DNA, 21 bp, synthetic construct
  source 1..21: mol_type = other DNA
  modified_base 1: mod_base = OTHER; note = guanosine-3'-phosphate
  modified_base 2: mod_base = OTHER; note = adenosine-3'-phosphate
  modified_base 3: mod_base = OTHER; note = uridine-3'-phosphate
  modified_base 4: mod_base = OTHER; note = uridine-3'-phosphate
  modified_base 5: mod_base = OTHER; note = cytidine-3'-phosphate
  modified_base 6: mod_base = OTHER; note = 2'-O-methylcytidine-3'-phosphate
  modified_base 7: mod_base = OTHER; note = adenosine-3'-phosphate
  modified_base 8: mod_base = OTHER; note = uridine-3'-phosphate
  modified_base 9: mod_base = OTHER; note = guanosine-3'-phosphate
  modified_base 10: mod_base = OTHER; note = cytidine-3'-phosphate
  modified_base 11: mod_base = OTHER; note = uridine-3'-phosphate
  modified_base 12: mod_base = OTHER; note = cytidine-3'-phosphate
  modified_base 13: mod_base = OTHER; note = cytidine-3'-phosphate
  modified_base 14: mod_base = OTHER; note = uridine-3'-phosphate
  modified_base 15: mod_base = OTHER; note = uridine-3'-phosphate
  modified_base 16: mod_base = OTHER; note = guanosine-3'-phosphate
  modified_base 17: mod_base = OTHER; note = adenosine-3'-phosphate
  modified_base 18: mod_base = OTHER; note = cytidine-3'-phosphate
  modified_base 19: mod_base = OTHER; note = uridine-3'-phosphate
  modified_base 20: mod_base = OTHER; note = 2'-deoxythymidine-3'-phosphorothioate
  misc_feature 1..19: note = RNA
  misc_feature 20..21: note = DNA
gattccatgctccttgacttt

SEQ ID NO: 723 - DNA, 21 bp, synthetic construct
  source 1..21: mol_type = other DNA
  modified_base 1: mod_base = OTHER; note = 2'-deoxy-2'-fluoroadenosine-3'-phosphate
  modified_base 2: mod_base = OTHER; note = 2'-O-methylguanosine-3'-phosphate
  modified_base 3: mod_base = OTHER; note = 2'-deoxy-2'-fluorouridine-3'-phosphate
  modified_base 4: mod_base = OTHER; note = 2'-O-methylcytidine-3'-phosphate
  modified_base 5: mod_base = OTHER; note = 2'-deoxy-2'-fluoroadenosine-3'-phosphate
  modified_base 6: mod_base = OTHER; note = 2'-O-methyladenosine-3'-phosphate
  modified_base 7: mod_base = OTHER; note = 2'-deoxy-2'-fluoroguanosine-3'-phosphate
  modified_base 8: mod_base = OTHER; note = 2'-O-methylguanosine-3'-phosphate
  modified_base 9: mod_base = OTHER; note = 2'-deoxy-2'-fluoroadenosine-3'-phosphate
  modified_base 10: mod_base = OTHER; note = 2'-O-methylguanosine-3'-phosphate
  modified_base 11: mod_base = OTHER; note = 2'-deoxy-2'-fluorocytidine-3'-phosphate
  modified_base 12: mod_base = OTHER; note = 2'-O-methyladenosine-3'-phosphate
  modified_base 13: mod_base = OTHER; note = 2'-deoxy-2'-fluorouridine-3'-phosphate
  modified_base 14: mod_base = OTHER; note = 2'-O-methylguanosine-3'-phosphate
  modified_base 15: mod_base = OTHER; note = 2'-deoxy-2'-fluoroguanosine-3'-phosphate
  modified_base 16: mod_base = OTHER; note = 2'-O-methyladenosine-3'-phosphate
  modified_base 17: mod_base = OTHER; note = 2'-deoxy-2'-fluoroadenosine-3'-phosphate
  modified_base 18: mod_base = OTHER; note = 2'-O-methyluridine-3'-phosphate
  modified_base 19: mod_base = OTHER; note = 2'-deoxy-2'-fluorocytidine-3'-phosphate
  modified_base 20: mod_base = OTHER; note = 2'-deoxythymidine-3'-phosphorothioate
  misc_feature 1..19: note = RNA
  misc_feature 20..21: note = DNA
agtcaaggagcatggaatctt

SEQ ID NO: 724 - DNA, 21 bp, synthetic construct
  source 1..21: mol_type = other DNA
  modified_base 1: mod_base = OTHER; note = 2'-O-methylguanosine-3'-phosphate 5'phosphate
  modified_base 2: mod_base = OTHER; note = 2'-deoxy-2'-fluoroadenosine-3'-phosphate
  modified_base 3: mod_base = OTHER; note = 2'-O-methyluridine-3'-phosphate
  modified_base 4: mod_base = OTHER; note = 2'-deoxy-2'-fluorouridine-3'-phosphate
  modified_base 5: mod_base = OTHER; note = 2'-O-methylcytidine-3'-phosphate
  modified_base 6: mod_base = OTHER; note = 2'-deoxy-2'-fluorocytidine-3'-phosphate
  modified_base 7: mod_base = OTHER; note = 2'-O-methyladenosine-3'-phosphate
  modified_base 8: mod_base = OTHER; note = 2'-deoxy-2'-fluorouridine-3'-phosphate
  modified_base 9: mod_base = OTHER; note = 2'-O-methylguanosine-3'-phosphate
  modified_base 10: mod_base = OTHER; note = 2'-deoxy-2'-fluorocytidine-3'-phosphate
  modified_base 11: mod_base = OTHER; note = 2'-O-methyluridine-3'-phosphate
  modified_base 12: mod_base = OTHER; note = 2'-deoxy-2'-fluorocytidine-3'-phosphate
  modified_base 13: mod_base = OTHER; note = 2'-O-methylcytidine-3'-phosphate
  modified_base 14: mod_base = OTHER; note = 2'-deoxy-2'-fluorouridine-3'-phosphate
  modified_base 15: mod_base = OTHER; note = 2'-O-methyluridine-3'-phosphate
  modified_base 16: mod_base = OTHER; note = 2'-deoxy-2'-fluoroguanosine-3'-phosphate
  modified_base 17: mod_base = OTHER; note = 2'-O-methyladenosine-3'-phosphate
  modified_base 18: mod_base = OTHER; note = 2'-deoxy-2'-fluorocytidine-3'-phosphate
  modified_base 19: mod_base = OTHER; note = 2'-O-methyluridine-3'-phosphate
  modified_base 20: mod_base = OTHER; note = 2'-deoxythymidine-3'-phosphorothioate
  misc_feature 1..19: note = RNA
  misc_feature 20..21: note = DNA
gattccatgctccttgacttt

SEQ ID NO: 725 - DNA, 21 bp, synthetic construct
  source 1..21: mol_type = other DNA
  modified_base 1: mod_base = OTHER; note = adenosine-3'-phosphate
  modified_base 2: mod_base = OTHER; note = guanosine-3'-phosphate
  modified_base 3: mod_base = OTHER; note = 2'-deoxy-2'-fluorouridine-3'-phosphate
  modified_base 4: mod_base = OTHER; note = 2'-deoxy-2'-fluorocytidine-3'-phosphate
  modified_base 5: mod_base = OTHER; note = adenosine-3'-phosphate
  modified_base 6: mod_base = OTHER; note = adenosine-3'-phosphate
  modified_base 7: mod_base = OTHER; note = guanosine-3'-phosphate
  modified_base 8: mod_base = OTHER; note = guanosine-3'-phosphate
  modified_base 9: mod_base = OTHER; note = adenosine-3'-phosphate
  modified_base 10: mod_base = OTHER; note = guanosine-3'-phosphate
  modified_base 11: mod_base = OTHER; note = 2'-deoxy-2'-fluorocytidine-3'-phosphate
  modified_base 12: mod_base = OTHER; note = adenosine-3'-phosphate
  modified_base 13: mod_base = OTHER; note = 2'-deoxy-2'-fluorouridine-3'-phosphate
  modified_base 14: mod_base = OTHER; note = guanosine-3'-phosphate
  modified_base 15: mod_base = OTHER; note = guanosine-3'-phosphate
  modified_base 16: mod_base = OTHER; note = adenosine-3'-phosphate
  modified_base 17: mod_base = OTHER; note = adenosine-3'-phosphate
  modified_base 18: mod_base = OTHER; note = 2'-deoxy-2'-fluorouridine-3'-phosphate
  modified_base 19: mod_base = OTHER; note = 2'-deoxy-2'-fluorocytidine-3'-phosphate
  modified_base 20: mod_base = OTHER; note = 2'-deoxythymidine-3'-phosphorothioate
  misc_feature 1..19: note = RNA
  misc_feature 20..21: note = DNA
agtcaaggagcatggaatctt

SEQ ID NO: 726 - DNA, 21 bp, synthetic construct
  source 1..21: mol_type = other DNA
  modified_base 1: mod_base = OTHER; note = guanosine-3'-phosphate
  modified_base 2: mod_base = OTHER; note = adenosine-3'-phosphate
  modified_base 3: mod_base = OTHER; note = 2'-deoxy-2'-fluorouridine-3'-phosphate
  modified_base 4: mod_base = OTHER; note = 2'-deoxy-2'-fluorouridine-3'-phosphate
  modified_base 5: mod_base = OTHER; note = 2'-deoxy-2'-fluorocytidine-3'-phosphate
  modified_base 6: mod_base = OTHER; note = 2'-deoxy-2'-fluorocytidine-3'-phosphate
  modified_base 7: mod_base = OTHER; note = adenosine-3'-phosphate
  modified_base 8: mod_base = OTHER; note = 2'-deoxy-2'-fluorouridine-3'-phosphate
  modified_base 9: mod_base = OTHER; note = guanosine-3'-phosphate
  modified_base 10: mod_base = OTHER; note = 2'-deoxy-2'-fluorocytidine-3'-phosphate
  modified_base 11: mod_base = OTHER; note = 2'-deoxy-2'-fluorouridine-3'-phosphate
  modified_base 12: mod_base = OTHER; note = 2'-deoxy-2'-fluorocytidine-3'-phosphate
  modified_base 13: mod_base = OTHER; note = 2'-deoxy-2'-fluorocytidine-3'-phosphate
  modified_base 14: mod_base = OTHER; note = 2'-deoxy-2'-fluorouridine-3'-phosphate
  modified_base 15: mod_base = OTHER; note = 2'-deoxy-2'-fluorouridine-3'-phosphate
  modified_base 16: mod_base = OTHER; note = guanosine-3'-phosphate
  modified_base 17: mod_base = OTHER; note = adenosine-3'-phosphate
  modified_base 18: mod_base = OTHER; note = 2'-deoxy-2'-fluorocytidine-3'-phosphate
  modified_base 19: mod_base = OTHER; note = 2'-deoxy-2'-fluorouridine-3'-phosphate
  modified_base 20: mod_base = OTHER; note = 2'-deoxythymidine-3'-phosphorothioate
  misc_feature 1..19: note = RNA
  misc_feature 20..21: note = DNA
gattccatgctccttgacttt

SEQ ID NO: 727 - DNA, 21 bp, synthetic construct
  source 1..21: mol_type = other DNA
  modified_base 1: mod_base = OTHER; note = adenosine-3'-phosphate
  modified_base 2: mod_base = OTHER; note = 2'-O-methylguanosine-3'-phosphate
  modified_base 3: mod_base = OTHER; note = uridine-3'-phosphate
  modified_base 4: mod_base = OTHER; note = 2'-O-methylcytidine-3'-phosphate
  modified_base 5: mod_base = OTHER; note = adenosine-3'-phosphate
  modified_base 6: mod_base = OTHER; note = 2'-O-methyladenosine-3'-phosphate
  modified_base 7: mod_base = OTHER; note = guanosine-3'-phosphate
  modified_base 8: mod_base = OTHER; note = 2'-O-methylguanosine-3'-phosphate
  modified_base 9: mod_base = OTHER; note = adenosine-3'-phosphate
  modified_base 10: mod_base = OTHER; note = 2'-O-methylguanosine-3'-phosphate
  modified_base 11: mod_base = OTHER; note = cytidine-3'-phosphate
  modified_base 12: mod_base = OTHER; note = 2'-O-methyladenosine-3'-phosphate
  modified_base 13: mod_base = OTHER; note = uridine-3'-phosphate
  modified_base 14: mod_base = OTHER; note = 2'-O-methylguanosine-3'-phosphate
  modified_base 15: mod_base = OTHER; note = guanosine-3'-phosphate
  modified_base 16: mod_base = OTHER; note = 2'-O-methyladenosine-3'-phosphate
  modified_base 17: mod_base = OTHER; note = adenosine-3'-phosphate
  modified_base 18: mod_base = OTHER; note = 2'-O-methyluridine-3'-phosphate
  modified_base 19: mod_base = OTHER; note = cytidine-3'-phosphate
  modified_base 20: mod_base = OTHER; note = 2'-deoxythymidine-3'-phosphorothioate
  misc_feature 1..19: note = RNA
  misc_feature 20..21: note = DNA
agtcaaggagcatggaatctt

SEQ ID NO: 728 - DNA, 21 bp, synthetic construct
  source 1..21: mol_type = other DNA
  modified_base 1: mod_base = OTHER; note = 2'-O-methylguanosine-3'-phosphate 5'phosphate
  modified_base 2: mod_base = OTHER; note = 2'-deoxy-2'-fluoroadenosine-3'-phosphate
  modified_base 3: mod_base = OTHER; note = 2'-O-methyluridine-3'-phosphate
  modified_base 4: mod_base = OTHER; note = 2'-deoxy-2'-fluorouridine-3'-phosphate
  modified_base 5: mod_base = OTHER; note = 2'-O-methylcytidine-3'-phosphate
  modified_base 6: mod_base = OTHER; note = 2'-deoxy-2'-fluorocytidine-3'-phosphate
  modified_base 7: mod_base = OTHER; note = 2'-O-methyladenosine-3'-phosphate
  modified_base 8: mod_base = OTHER; note = 2'-deoxy-2'-fluorouridine-3'-phosphate
  modified_base 9: mod_base = OTHER; note = 2'-O-methylguanosine-3'-phosphate
  modified_base 10: mod_base = OTHER; note = 2'-deoxy-2'-fluorocytidine-3'-phosphate
  modified_base 11: mod_base = OTHER; note = 2'-O-methyluridine-3'-phosphate
  modified_base 12: mod_base = OTHER; note = 2'-deoxy-2'-fluorocytidine-3'-phosphate
  modified_base 13: mod_base = OTHER; note = 2'-O-methylcytidine-3'-phosphate
  modified_base 14: mod_base = OTHER; note = 2'-deoxy-2'-fluorouridine-3'-phosphate
  modified_base 15: mod_base = OTHER; note = 2'-O-methyluridine-3'-phosphate
  modified_base 16: mod_base = OTHER; note = 2'-deoxy-2'-fluoroguanosine-3'-phosphate
  modified_base 17: mod_base = OTHER; note = 2'-O-methyladenosine-3'-phosphate
  modified_base 18: mod_base = OTHER; note = 2'-deoxy-2'-fluorocytidine-3'-phosphate
  modified_base 19: mod_base = OTHER; note = 2'-O-methyluridine-3'-phosphate
  modified_base 20: mod_base = OTHER; note = 2'-deoxythymidine-3'-phosphorothioate
  misc_feature 1..19: note = RNA
  misc_feature 20..21: note = DNA
gattccatgctccttgacttt

SEQ ID NO: 729 - DNA, 21 bp, synthetic construct
  source 1..21: mol_type = other DNA
  modified_base 1: mod_base = OTHER; note = adenosine-3'-phosphate
  modified_base 2: mod_base = OTHER; note = 2'-O-methylguanosine-3'-phosphate
  modified_base 3: mod_base = OTHER; note = uridine-3'-phosphate
  modified_base 4: mod_base = OTHER; note = 2'-O-methylcytidine-3'-phosphate
  modified_base 5: mod_base = OTHER; note = adenosine-3'-phosphate
  modified_base 6: mod_base = OTHER; note = 2'-O-methyladenosine-3'-phosphate
  modified_base 7: mod_base = OTHER; note = guanosine-3'-phosphate
  modified_base 8: mod_base = OTHER; note = 2'-O-methylguanosine-3'-phosphate
  modified_base 9: mod_base = OTHER; note = adenosine-3'-phosphate
  modified_base 10: mod_base = OTHER; note = 2'-O-methylguanosine-3'-phosphate
  modified_base 11: mod_base = OTHER; note = cytidine-3'-phosphate
  modified_base 12: mod_base = OTHER; note = 2'-O-methyladenosine-3'-phosphate
  modified_base 13: mod_base = OTHER; note = uridine-3'-phosphate
  modified_base 14: mod_base = OTHER; note = 2'-O-methylguanosine-3'-phosphate
  modified_base 15: mod_base = OTHER; note = guanosine-3'-phosphate
  modified_base 16: mod_base = OTHER; note = 2'-O-methyladenosine-3'-phosphate
  modified_base 17: mod_base = OTHER; note = adenosine-3'-phosphate
  modified_base 18: mod_base = OTHER; note = 2'-O-methyluridine-3'-phosphate
  modified_base 19: mod_base = OTHER; note = cytidine-3'-phosphate
  modified_base 20: mod_base = OTHER; note = 2'-deoxythymidine-3'-phosphorothioate
  misc_feature 1..19: note = RNA
  misc_feature 20..21: note = DNA
agtcaaggagcatggaatctt

SEQ ID NO: 730 - DNA, 21 bp, synthetic construct
  source 1..21: mol_type = other DNA
  modified_base 1: mod_base = OTHER; note = guanosine-3'-phosphate
  modified_base 2: mod_base = OTHER; note = adenosine-3'-phosphate
  modified_base 3: mod_base = OTHER; note = 2'-deoxy-2'-fluorouridine-3'-phosphate
  modified_base 4: mod_base = OTHER; note = 2'-deoxy-2'-fluorouridine-3'-phosphate
  modified_base 5: mod_base = OTHER; note = 2'-deoxy-2'-fluorocytidine-3'-phosphate
  modified_base 6: mod_base = OTHER; note = 2'-deoxy-2'-fluorocytidine-3'-phosphate
  modified_base 7: mod_base = OTHER; note = adenosine-3'-phosphate
  modified_base 8: mod_base = OTHER; note = 2'-deoxy-2'-fluorouridine-3'-phosphate
  modified_base 9: mod_base = OTHER; note = guanosine-3'-phosphate
  modified_base 10: mod_base = OTHER; note = 2'-deoxy-2'-fluorocytidine-3'-phosphate
  modified_base 11: mod_base = OTHER; note = 2'-deoxy-2'-fluorouridine-3'-phosphate
  modified_base 12: mod_base = OTHER; note = 2'-deoxy-2'-fluorocytidine-3'-phosphate
  modified_base 13: mod_base = OTHER; note = 2'-deoxy-2'-fluorocytidine-3'-phosphate
  modified_base 14: mod_base = OTHER; note = 2'-deoxy-2'-fluorouridine-3'-phosphate
  modified_base 15: mod_base = OTHER; note = 2'-deoxy-2'-fluorouridine-3'-phosphate
  modified_base 16: mod_base = OTHER; note = guanosine-3'-phosphate
  modified_base 17: mod_base = OTHER; note = adenosine-3'-phosphate
  modified_base 18: mod_base = OTHER; note = 2'-deoxy-2'-fluorocytidine-3'-phosphate
  modified_base 19: mod_base = OTHER; note = 2'-deoxy-2'-fluorouridine-3'-phosphate
  modified_base 20: mod_base = OTHER; note = 2'-deoxythymidine-3'-phosphorothioate
  misc_feature 1..19: note = RNA
  misc_feature 20..21: note = DNA
gattccatgctccttgacttt

SEQ ID NO: 731 - DNA, 21 bp, synthetic construct
  source 1..21: mol_type = other DNA
  modified_base 1: mod_base = OTHER; note = 2'-deoxy-2'-fluoroadenosine-3'-phosphate
  modified_base 2: mod_base = OTHER; note = 2'-O-methylguanosine-3'-phosphate
  modified_base 3: mod_base = OTHER; note = 2'-deoxy-2'-fluorouridine-3'-phosphate
  modified_base 4: mod_base = OTHER; note = 2'-O-methylcytidine-3'-phosphate
  modified_base 5: mod_base = OTHER; note = 2'-deoxy-2'-fluoroadenosine-3'-phosphate
  modified_base 6: mod_base = OTHER; note = 2'-O-methyladenosine-3'-phosphate
  modified_base 7: mod_base = OTHER; note = 2'-deoxy-2'-fluoroguanosine-3'-phosphate
  modified_base 8: mod_base = OTHER; note = 2'-O-methylguanosine-3'-phosphate
  modified_base 9: mod_base = OTHER; note = 2'-deoxy-2'-fluoroadenosine-3'-phosphate
  modified_base 10: mod_base = OTHER; note = 2'-O-methylguanosine-3'-phosphate
  modified_base 11: mod_base = OTHER; note = 2'-deoxy-2'-fluorocytidine-3'-phosphate
  modified_base 12: mod_base = OTHER; note = 2'-O-methyladenosine-3'-phosphate
  modified_base 13: mod_base = OTHER; note = 2'-deoxy-2'-fluorouridine-3'-phosphate
  modified_base 14: mod_base = OTHER; note = 2'-O-methylguanosine-3'-phosphate
  modified_base 15: mod_base = OTHER; note = 2'-deoxy-2'-fluoroguanosine-3'-phosphate
  modified_base 16: mod_base = OTHER; note = 2'-O-methyladenosine-3'-phosphate
  modified_base 17: mod_base = OTHER; note = 2'-deoxy-2'-fluoroadenosine-3'-phosphate
  modified_base 18: mod_base = OTHER; note = 2'-O-methyluridine-3'-phosphate
  modified_base 19: mod_base = OTHER; note = 2'-deoxy-2'-fluorocytidine-3'-phosphate
  modified_base 20: mod_base = OTHER; note = 2'-deoxythymidine-3'-phosphorothioate
  misc_feature 1..19: note = RNA
  misc_feature 20..21: note = DNA
agtcaaggagcatggaatctt

SEQ ID NO: 732 - DNA, 21 bp, synthetic construct
  source 1..21: mol_type = other DNA
  modified_base 1: mod_base = OTHER; note = guanosine-3'-phosphate
  modified_base 2: mod_base = OTHER; note = adenosine-3'-phosphate
  modified_base 3: mod_base = OTHER; note = uridine-3'-phosphate
  modified_base 4: mod_base = OTHER; note = uridine-3'-phosphate
  modified_base 5: mod_base = OTHER; note = cytidine-3'-phosphate
  modified_base 6: mod_base = OTHER; note = 2'-O-methylcytidine-3'-phosphate
  modified_base 7: mod_base = OTHER; note = 2'-O-methyladenosine-3'-phosphate
  modified_base 8: mod_base = OTHER; note = uridine-3'-phosphate
  modified_base 9: mod_base = OTHER; note = guanosine-3'-phosphate
  modified_base 10: mod_base = OTHER; note = 2'-O-methylcytidine-3'-phosphate
  modified_base 11: mod_base = OTHER; note = 2'-O-methyluridine-3'-phosphate
  modified_base 12: mod_base = OTHER; note = cytidine-3'-phosphate
  modified_base 13: mod_base = OTHER; note = cytidine-3'-phosphate
  modified_base 14: mod_base = OTHER; note = uridine-3'-phosphate
  modified_base 15: mod_base = OTHER; note = uridine-3'-phosphate
  modified_base 16: mod_base = OTHER; note = guanosine-3'-phosphate
  modified_base 17: mod_base = OTHER; note = 2'-O-methyladenosine-3'-phosphate
  modified_base 18: mod_base = OTHER; note = 2'-O-methylcytidine-3'-phosphate
  modified_base 19: mod_base = OTHER; note = 2'-O-methyluridine-3'-phosphate
  modified_base 20: mod_base = OTHER; note = 2'-deoxythymidine-3'-phosphorothioate
  misc_feature 1..19: note = RNA
  misc_feature 20..21: note = DNA
gattccatgctccttgacttt

SEQ ID NO: 733 - DNA, 21 bp, synthetic construct
  source 1..21: mol_type = other DNA
  modified_base 1: mod_base = OTHER; note = adenosine-3'-phosphate
  modified_base 2: mod_base = OTHER; note = guanosine-3'-phosphate
  modified_base 3: mod_base = OTHER; note = 2'-deoxy-2'-fluorouridine-3'-phosphate
  modified_base 4: mod_base = OTHER; note = 2'-deoxy-2'-fluorocytidine-3'-phosphate
  modified_base 5: mod_base = OTHER; note = adenosine-3'-phosphate
  modified_base 6: mod_base = OTHER; note = adenosine-3'-phosphate
  modified_base 7: mod_base = OTHER; note = guanosine-3'-phosphate
  modified_base 8: mod_base = OTHER; note = guanosine-3'-phosphate
  modified_base 9: mod_base = OTHER; note = adenosine-3'-phosphate
  modified_base 10: mod_base = OTHER; note = guanosine-3'-phosphate
  modified_base 11: mod_base = OTHER; note = 2'-deoxy-2'-fluorocytidine-3'-phosphate
  modified_base 12: mod_base = OTHER; note = adenosine-3'-phosphate
  modified_base 13: mod_base = OTHER; note = 2'-deoxy-2'-fluorouridine-3'-phosphate
  modified_base 14: mod_base = OTHER; note = guanosine-3'-phosphate
  modified_base 15: mod_base = OTHER; note = guanosine-3'-phosphate
  modified_base 16: mod_base = OTHER; note = adenosine-3'-phosphate
  modified_base 17: mod_base = OTHER; note = adenosine-3'-phosphate
  modified_base 18: mod_base = OTHER; note = 2'-deoxy-2'-fluorouridine-3'-phosphate
  modified_base 19: mod_base = OTHER; note = 2'-deoxy-2'-fluorocytidine-3'-phosphate
  modified_base 20: mod_base = OTHER; note = 2'-deoxythymidine-3'-phosphorothioate
  misc_feature 1..19: note = RNA
  misc_feature 20..21: note = DNA
agtcaaggagcatggaatctt

SEQ ID NO: 734 - DNA, 21 bp, synthetic construct
  source 1..21: mol_type = other DNA
  modified_base 1: mod_base = OTHER; note = guanosine-3'-phosphate
  modified_base 2: mod_base = OTHER; note = adenosine-3'-phosphate
  modified_base 3: mod_base = OTHER; note = uridine-3'-phosphate
  modified_base 4: mod_base = OTHER; note = uridine-3'-phosphate
  modified_base 5: mod_base = OTHER; note = cytidine-3'-phosphate
  modified_base 6: mod_base = OTHER; note = 2'-O-methylcytidine-3'-phosphate
  modified_base 7: mod_base = OTHER; note = 2'-O-methyladenosine-3'-phosphate
  modified_base 8: mod_base = OTHER; note = uridine-3'-phosphate
  modified_base 9: mod_base = OTHER; note = guanosine-3'-phosphate
  modified_base 10: mod_base = OTHER; note = 2'-O-methylcytidine-3'-phosphate
  modified_base 11: mod_base = OTHER; note = 2'-O-methyluridine-3'-phosphate
  modified_base 12: mod_base = OTHER; note = cytidine-3'-phosphate
  modified_base 13: mod_base = OTHER; note = cytidine-3'-phosphate
  modified_base 14: mod_base = OTHER; note = uridine-3'-phosphate
  modified_base 15: mod_base = OTHER; note = uridine-3'-phosphate
  modified_base 16: mod_base = OTHER; note = guanosine-3'-phosphate
  modified_base 17: mod_base = OTHER; note = 2'-O-methyladenosine-3'-phosphate
  modified_base 18: mod_base = OTHER; note = 2'-O-methylcytidine-3'-phosphate
  modified_base 19: mod_base = OTHER; note = 2'-O-methyluridine-3'-phosphate
  modified_base 20: mod_base = OTHER; note = 2'-deoxythymidine-3'-phosphorothioate
  misc_feature 1..19: note = RNA
  misc_feature 20..21: note = DNA
gattccatgctccttgacttt

SEQ ID NO: 735 - DNA, 21 bp, synthetic construct
  source 1..21: mol_type = other DNA
  modified_base 1: mod_base = OTHER; note = adenosine-3'-phosphate
  modified_base 2: mod_base = OTHER; note = 2'-O-methylguanosine-3'-phosphate
  modified_base 3: mod_base = OTHER; note = uridine-3'-phosphate
  modified_base 4: mod_base = OTHER; note = 2'-O-methylcytidine-3'-phosphate
  modified_base 5: mod_base = OTHER; note = adenosine-3'-phosphate
  modified_base 6: mod_base = OTHER; note = 2'-O-methyladenosine-3'-phosphate
  modified_base 7: mod_base = OTHER; note = guanosine-3'-phosphate
  modified_base 8: mod_base = OTHER; note = 2'-O-methylguanosine-3'-phosphate
  modified_base 9: mod_base = OTHER; note = adenosine-3'-phosphate
  modified_base 10: mod_base = OTHER; note = 2'-O-methylguanosine-3'-phosphate
  modified_base 11: mod_base = OTHER; note = cytidine-3'-phosphate
  modified_base 12: mod_base = OTHER; note = 2'-O-methyladenosine-3'-phosphate
  modified_base 13: mod_base = OTHER; note = uridine-3'-phosphate
  modified_base 14: mod_base = OTHER; note = 2'-O-methylguanosine-3'-phosphate
  modified_base 15: mod_base = OTHER; note = guanosine-3'-phosphate
  modified_base 16: mod_base = OTHER; note = 2'-O-methyladenosine-3'-phosphate
  modified_base 17: mod_base = OTHER; note = adenosine-3'-phosphate
  modified_base 18: mod_base = OTHER; note = 2'-O-methyluridine-3'-phosphate
  modified_base 19: mod_base = OTHER; note = cytidine-3'-phosphate
  modified_base 20: mod_base = OTHER; note = 2'-deoxythymidine-3'-phosphorothioate
  misc_feature 1..19: note = RNA
  misc_feature 20..21: note = DNA
agtcaaggagcatggaatctt

SEQ ID NO: 736 - DNA, 21 bp, synthetic construct
  source 1..21: mol_type = other DNA
  modified_base 1: mod_base = OTHER; note = guanosine-3'-phosphate
  modified_base 2: mod_base = OTHER; note = adenosine-3'-phosphate
  modified_base 3: mod_base = OTHER; note = uridine-3'-phosphate
  modified_base 4: mod_base = OTHER; note = uridine-3'-phosphate
  modified_base 5: mod_base = OTHER; note = cytidine-3'-phosphate
  modified_base 6: mod_base = OTHER; note = 2'-O-methylcytidine-3'-phosphate
  modified_base 7: mod_base = OTHER; note = 2'-O-methyladenosine-3'-phosphate
  modified_base 8: mod_base = OTHER; note = uridine-3'-phosphate
  modified_base 9: mod_base = OTHER; note = guanosine-3'-phosphate
  modified_base 10: mod_base = OTHER; note = 2'-O-methylcytidine-3'-phosphate
  modified_base 11: mod_base = OTHER; note = 2'-O-methyluridine-3'-phosphate
  modified_base 12: mod_base = OTHER; note = cytidine-3'-phosphate
  modified_base 13: mod_base = OTHER; note = cytidine-3'-phosphate
  modified_base 14: mod_base = OTHER; note = uridine-3'-phosphate
  modified_base 15: mod_base = OTHER; note = uridine-3'-phosphate
  modified_base 16: mod_base = OTHER; note = guanosine-3'-phosphate
  modified_base 17: mod_base = OTHER; note = 2'-O-methyladenosine-3'-phosphate
  modified_base 18: mod_base = OTHER; note = 2'-O-methylcytidine-3'-phosphate
  modified_base 19: mod_base = OTHER; note = 2'-O-methyluridine-3'-phosphate
  modified_base 20: mod_base = OTHER; note = 2'-deoxythymidine-3'-phosphorothioate
  misc_feature 1..19: note = RNA
  misc_feature 20..21: note = DNA
gattccatgctccttgacttt

SEQ ID NO: 737 - DNA, 21 bp, synthetic construct
  source 1..21: mol_type = other DNA
  modified_base 1: mod_base = OTHER; note = 2'-deoxy-2'-fluoroguanosine-3'-phosphate
  modified_base 2: mod_base = OTHER; note = 2'-O-methylcytidine-3'-phosphate
  modified_base 3: mod_base = OTHER; note = 2'-deoxy-2'-fluoroguanosine-3'-phosphate
  modified_base 4: mod_base = OTHER; note = 2'-O-methylguanosine-3'-phosphate
  modified_base 5: mod_base = OTHER; note = 2'-deoxy-2'-fluorocytidine-3'-phosphate
  modified_base 6: mod_base = OTHER; note = 2'-O-methyladenosine-3'-phosphate
  modified_base 7: mod_base = OTHER; note = 2'-deoxy-2'-fluorocytidine-3'-phosphate
  modified_base 8: mod_base = OTHER; note = 2'-O-methylcytidine-3'-phosphate
  modified_base 9: mod_base = OTHER; note = 2'-deoxy-2'-fluorocytidine-3'-phosphate
  modified_base 10: mod_base = OTHER; note = 2'-O-methyluridine-3'-phosphate
  modified_base 11: mod_base = OTHER; note = 2'-deoxy-2'-fluorocytidine-3'-phosphate
  modified_base 12: mod_base = OTHER; note = 2'-O-methyladenosine-3'-phosphate
  modified_base 13: mod_base = OTHER; note = 2'-deoxy-2'-fluorouridine-3'-phosphate
  modified_base 14: mod_base = OTHER; note = 2'-O-methyladenosine-3'-phosphate
  modified_base 15: mod_base = OTHER; note = 2'-deoxy-2'-fluoroguanosine-3'-phosphate
  modified_base 16: mod_base = OTHER; note = 2'-O-methylguanosine-3'-phosphate
  modified_base 17: mod_base = OTHER; note = 2'-deoxy-2'-fluorocytidine-3'-phosphate
  modified_base 18: mod_base = OTHER; note = 2'-O-methylcytidine-3'-phosphate
  modified_base 19: mod_base = OTHER; note = 2'-deoxy-2'-fluorouridine-3'-phosphate
  modified_base 20: mod_base = OTHER; note = 2'-deoxythymidine-3'-phosphorothioate
  misc_feature 1..19: note = RNA
  misc_feature 20..21: note = DNA
gcggcaccctcataggccttt

SEQ ID NO: 738 - DNA, 21 bp, synthetic construct
  source 1..21: mol_type = other DNA
  modified_base 1: mod_base = OTHER; note = 2'-O-methyladenosine-3'-phosphate 5'phosphate
  modified_base 2: mod_base = OTHER; note = 2'-deoxy-2'-fluoroguanosine-3'-phosphate
  modified_base 3: mod_base = OTHER; note = 2'-O-methylguanosine-3'-phosphate
  modified_base 4: mod_base = OTHER; note = 2'-deoxy-2'-fluorocytidine-3'-phosphate
  modified_base 5: mod_base = OTHER; note = 2'-O-methylcytidine-3'-phosphate
  modified_base 6: mod_base = OTHER; note = 2'-deoxy-2'-fluorouridine-3'-phosphate
  modified_base 7: mod_base = OTHER; note = 2'-O-methyladenosine-3'-phosphate
  modified_base 8: mod_base = OTHER; note = 2'-deoxy-2'-fluorouridine-3'-phosphate
  modified_base 9: mod_base = OTHER; note = 2'-O-methylguanosine-3'-phosphate
  modified_base 10: mod_base = OTHER; note = 2'-deoxy-2'-fluoroadenosine-3'-phosphate
  modified_base 11: mod_base = OTHER; note = 2'-O-methylguanosine-3'-phosphate
  modified_base 12: mod_base = OTHER; note = 2'-deoxy-2'-fluoroguanosine-3'-phosphate
  modified_base 13: mod_base = OTHER; note = 2'-O-methylguanosine-3'-phosphate
  modified_base 14: mod_base = OTHER; note = 2'-deoxy-2'-fluorouridine-3'-phosphate
  modified_base 15: mod_base = OTHER; note = 2'-O-methylguanosine-3'-phosphate
  modified_base 16: mod_base = OTHER; note = 2'-deoxy-2'-fluorocytidine-3'-phosphate
  modified_base 17: mod_base = OTHER; note = 2'-O-methylcytidine-3'-phosphate
  modified_base 18: mod_base = OTHER; note = 2'-deoxy-2'-fluoroguanosine-3'-phosphate
  modified_base 19: mod_base = OTHER; note = 2'-O-methylcytidine-3'-phosphate
  modified_base 20: mod_base = OTHER; note = 2'-deoxythymidine-3'-phosphorothioate
  misc_feature 1..19: note = RNA
  misc_feature 20..21: note = DNA
aggcctatgagggtgccgctt

SEQ ID NO: 739 - DNA, 21 bp, synthetic construct
  source 1..21: mol_type = other DNA
  modified_base 1: mod_base = OTHER; note = guanosine-3'-phosphate
  modified_base 2: mod_base = OTHER; note = 2'-deoxy-2'-fluorocytidine-3'-phosphate
  modified_base 3: mod_base = OTHER; note = guanosine-3'-phosphate
  modified_base 4: mod_base = OTHER; note = guanosine-3'-phosphate
  modified_base 5: mod_base = OTHER; note = 2'-deoxy-2'-fluorocytidine-3'-phosphate
  modified_base 6: mod_base = OTHER; note = adenosine-3'-phosphate
  modified_base 7: mod_base = OTHER; note = 2'-deoxy-2'-fluorocytidine-3'-phosphate
  modified_base 8: mod_base = OTHER; note = 2'-deoxy-2'-fluorocytidine-3'-phosphate
  modified_base 9: mod_base = OTHER; note = 2'-deoxy-2'-fluorocytidine-3'-phosphate
  modified_base 10: mod_base = OTHER; note = 2'-deoxy-2'-fluorouridine-3'-phosphate
  modified_base 11: mod_base = OTHER; note = 2'-deoxy-2'-fluorocytidine-3'-phosphate
  modified_base 12: mod_base = OTHER; note = adenosine-3'-phosphate
  modified_base 13: mod_base = OTHER; note = 2'-deoxy-2'-fluorouridine-3'-phosphate
  modified_base 14: mod_base = OTHER; note = adenosine-3'-phosphate
  modified_base 15: mod_base = OTHER; note = guanosine-3'-phosphate
  modified_base 16: mod_base = OTHER; note = guanosine-3'-phosphate
  modified_base 17: mod_base = OTHER; note = 2'-deoxy-2'-fluorocytidine-3'-phosphate
  modified_base 18: mod_base = OTHER; note = 2'-deoxy-2'-fluorocytidine-3'-phosphate
  modified_base 19: mod_base = OTHER; note = 2'-deoxy-2'-fluorouridine-3'-phosphate
  modified_base 20: mod_base = OTHER; note = 2'-deoxythymidine-3'-phosphorothioate
  misc_feature 1..19: note = RNA
  misc_feature 20..21: note = DNA
gcggcaccctcataggccttt

SEQ ID NO: 740 - DNA, 21 bp, synthetic construct
  source 1..21: mol_type = other DNA
  modified_base 1: mod_base = OTHER; note = adenosine-3'-phosphate
  modified_base 2: mod_base = OTHER; note = guanosine-3'-phosphate
  modified_base 3: mod_base = OTHER; note = guanosine-3'-phosphate
  modified_base 4: mod_base = OTHER; note = 2'-deoxy-2'-fluorocytidine-3'-phosphate
  modified_base 5: mod_base = OTHER; note = 2'-deoxy-2'-fluorocytidine-3'-phosphate
  modified_base 6: mod_base = OTHER; note = 2'-deoxy-2'-fluorouridine-3'-phosphate
  modified_base 7: mod_base = OTHER; note = adenosine-3'-phosphate
  modified_base 8: mod_base = OTHER; note = 2'-deoxy-2'-fluorouridine-3'-phosphate
  modified_base 9: mod_base = OTHER; note = guanosine-3'-phosphate
  modified_base 10: mod_base = OTHER; note = adenosine-3'-phosphate
  modified_base 11: mod_base = OTHER; note = guanosine-3'-phosphate
  modified_base 12: mod_base = OTHER; note = guanosine-3'-phosphate
  modified_base 13: mod_base = OTHER; note = guanosine-3'-phosphate
  modified_base 14: mod_base = OTHER; note = 2'-deoxy-2'-fluorouridine-3'-phosphate
  modified_base 15: mod_base = OTHER; note = guanosine-3'-phosphate
  modified_base 16: mod_base = OTHER; note = 2'-deoxy-2'-fluorocytidine-3'-phosphate
  modified_base 17: mod_base = OTHER; note = 2'-deoxy-2'-fluorocytidine-3'-phosphate
  modified_base 18: mod_base = OTHER; note = guanosine-3'-phosphate
  modified_base 19: mod_base = OTHER; note = 2'-deoxy-2'-fluorocytidine-3'-phosphate
  modified_base 20: mod_base = OTHER; note = 2'-deoxythymidine-3'-phosphorothioate
  misc_feature 1..19: note = RNA
  misc_feature 20..21: note = DNA
aggcctatgagggtgccgctt

SEQ ID NO: 741 - DNA, 21 bp, synthetic construct
  source 1..21: mol_type = other DNA
  modified_base 1: mod_base = OTHER; note = guanosine-3'-phosphate
  modified_base 2: mod_base = OTHER; note = 2'-O-methylcytidine-3'-phosphate
  modified_base 3: mod_base = OTHER; note = guanosine-3'-phosphate
  modified_base 4: mod_base = OTHER; note = 2'-O-methylguanosine-3'-phosphate
  modified_base 5: mod_base = OTHER; note = cytidine-3'-phosphate
  modified_base 6: mod_base = OTHER; note = 2'-O-methyladenosine-3'-phosphate
  modified_base 7: mod_base = OTHER; note = cytidine-3'-phosphate
  modified_base 8: mod_base = OTHER; note = 2'-O-methylcytidine-3'-phosphate
  modified_base 9: mod_base = OTHER; note = cytidine-3'-phosphate
  modified_base 10: mod_base = OTHER; note = 2'-O-methyluridine-3'-phosphate
  modified_base 11: mod_base = OTHER; note = cytidine-3'-phosphate
  modified_base 12: mod_base = OTHER; note = 2'-O-methyladenosine-3'-phosphate
  modified_base 13: mod_base = OTHER; note = uridine-3'-phosphate
  modified_base 14: mod_base = OTHER; note = 2'-O-methyladenosine-3'-phosphate
  modified_base 15: mod_base = OTHER; note = guanosine-3'-phosphate
  modified_base 16: mod_base = OTHER; note = 2'-O-methylguanosine-3'-phosphate
  modified_base 17: mod_base = OTHER; note = cytidine-3'-phosphate
  modified_base 18: mod_base = OTHER; note = 2'-O-methylcytidine-3'-phosphate
  modified_base 19: mod_base = OTHER; note = uridine-3'-phosphate
  modified_base 20: mod_base = OTHER; note = 2'-deoxythymidine-3'-phosphorothioate
  misc_feature 1..19: note = RNA
  misc_feature 20..21: note = DNA
gcggcaccctcataggccttt

SEQ ID NO: 742 - DNA, 21 bp, synthetic construct
  source 1..21: mol_type = other DNA
  modified_base 1: mod_base = OTHER; note = 2'-O-methyladenosine-3'-phosphate 5'phosphate
  modified_base 2: mod_base = OTHER; note = 2'-deoxy-2'-fluoroguanosine-3'-phosphate
  modified_base 3: mod_base = OTHER; note = 2'-O-methylguanosine-3'-phosphate
  modified_base 4: mod_base = OTHER; note = 2'-deoxy-2'-fluorocytidine-3'-phosphate
  modified_base 5: mod_base = OTHER; note = 2'-O-methylcytidine-3'-phosphate
  modified_base 6: mod_base = OTHER; note = 2'-deoxy-2'-fluorouridine-3'-phosphate
  modified_base 7: mod_base = OTHER; note = 2'-O-methyladenosine-3'-phosphate
  modified_base 8: mod_base = OTHER; note = 2'-deoxy-2'-fluorouridine-3'-phosphate
  modified_base 9: mod_base = OTHER; note = 2'-O-methylguanosine-3'-phosphate
  modified_base 10: mod_base = OTHER; note = 2'-deoxy-2'-fluoroadenosine-3'-phosphate
  modified_base 11: mod_base = OTHER; note = 2'-O-methylguanosine-3'-phosphate
  modified_base 12: mod_base = OTHER; note = 2'-deoxy-2'-fluoroguanosine-3'-phosphate
  modified_base 13: mod_base = OTHER; note = 2'-O-methylguanosine-3'-phosphate
  modified_base 14: mod_base = OTHER; note = 2'-deoxy-2'-fluorouridine-3'-phosphate
  modified_base 15: mod_base = OTHER; note = 2'-O-methylguanosine-3'-phosphate
  modified_base 16: mod_base = OTHER; note = 2'-deoxy-2'-fluorocytidine-3'-phosphate
  modified_base 17: mod_base = OTHER; note = 2'-O-methylcytidine-3'-phosphate
  modified_base 18: mod_base = OTHER; note = 2'-deoxy-2'-fluoroguanosine-3'-phosphate
  modified_base 19: mod_base = OTHER; note = 2'-O-methylcytidine-3'-phosphate
  modified_base 20: mod_base = OTHER; note = 2'-deoxythymidine-3'-phosphorothioate
  misc_feature 1..19: note = RNA
  misc_feature 20..21: note = DNA
aggcctatgagggtgccgctt

SEQ ID NO: 743 - DNA, 21 bp, synthetic construct
  source 1..21: mol_type = other DNA
  modified_base 1: mod_base = OTHER; note = guanosine-3'-phosphate
  modified_base 2: mod_base = OTHER; note = 2'-O-methylcytidine-3'-phosphate
  modified_base 3: mod_base = OTHER; note = guanosine-3'-phosphate
  modified_base 4: mod_base = OTHER; note = 2'-O-methylguanosine-3'-phosphate
  modified_base 5: mod_base = OTHER; note = cytidine-3'-phosphate
  modified_base 6: mod_base = OTHER; note = 2'-O-methyladenosine-3'-phosphate
  modified_base 7: mod_base = OTHER; note = cytidine-3'-phosphate
  modified_base 8: mod_base = OTHER; note = 2'-O-methylcytidine-3'-phosphate
  modified_base 9: mod_base = OTHER; note = cytidine-3'-phosphate
  modified_base 10: mod_base = OTHER; note = 2'-O-methyluridine-3'-phosphate
  modified_base 11: mod_base = OTHER; note = cytidine-3'-phosphate
  modified_base 12: mod_base = OTHER; note = 2'-O-methyladenosine-3'-phosphate
  modified_base 13: mod_base = OTHER; note = uridine-3'-phosphate
  modified_base 14: mod_base = OTHER; note = 2'-O-methyladenosine-3'-phosphate
  modified_base 15: mod_base = OTHER; note = guanosine-3'-phosphate
  modified_base 16: mod_base = OTHER; note = 2'-O-methylguanosine-3'-phosphate
  modified_base 17: mod_base = OTHER; note = cytidine-3'-phosphate
  modified_base 18: mod_base = OTHER; note = 2'-O-methylcytidine-3'-phosphate
  modified_base 19: mod_base = OTHER; note = uridine-3'-phosphate
  modified_base 20: mod_base = OTHER; note = 2'-deoxythymidine-3'-phosphorothioate
  misc_feature 1..19: note = RNA
  misc_feature 20..21: note = DNA
gcggcaccctcataggccttt

SEQ ID NO: 744 - DNA, 21 bp, synthetic construct
  source 1..21: mol_type = other DNA
  modified_base 1: mod_base = OTHER; note = adenosine-3'-phosphate
  modified_base 2: mod_base = OTHER; note = guanosine-3'-phosphate
  modified_base 3: mod_base = OTHER; note = guanosine-3'-phosphate
  modified_base 4: mod_base = OTHER; note = 2'-deoxy-2'-fluorocytidine-3'-phosphate
  modified_base 5: mod_base = OTHER; note = 2'-deoxy-2'-fluorocytidine-3'-phosphate
  modified_base 6: mod_base = OTHER; note = 2'-deoxy-2'-fluorouridine-3'-phosphate
  modified_base 7: mod_base = OTHER; note = adenosine-3'-phosphate
  modified_base 8: mod_base = OTHER; note = 2'-deoxy-2'-fluorouridine-3'-phosphate
  modified_base 9: mod_base = OTHER; note = guanosine-3'-phosphate
  modified_base 10: mod_base = OTHER; note = adenosine-3'-phosphate
  modified_base 11: mod_base = OTHER; note = guanosine-3'-phosphate
  modified_base 12: mod_base = OTHER; note = guanosine-3'-phosphate
  modified_base 13: mod_base = OTHER; note = guanosine-3'-phosphate
  modified_base 14: mod_base = OTHER; note = 2'-deoxy-2'-fluorouridine-3'-phosphate
  modified_base 15: mod_base = OTHER; note = guanosine-3'-phosphate
  modified_base 16: mod_base = OTHER; note = 2'-deoxy-2'-fluorocytidine-3'-phosphate
  modified_base 17: mod_base = OTHER; note = 2'-deoxy-2'-fluorocytidine-3'-phosphate
  modified_base 18: mod_base = OTHER; note = guanosine-3'-phosphate
  modified_base 19: mod_base = OTHER; note = 2'-deoxy-2'-fluorocytidine-3'-phosphate
  modified_base 20: mod_base = OTHER; note = 2'-deoxythymidine-3'-phosphorothioate
  misc_feature 1..19: note = RNA
  misc_feature 20..21: note = DNA
aggcctatgagggtgccgctt

SEQ ID NO: 745 - DNA, 21 bp, synthetic construct
  source 1..21: mol_type = other DNA
  modified_base 1: mod_base = OTHER; note = 2'-deoxy-2'-fluoroguanosine-3'-phosphate
  modified_base 2: mod_base = OTHER; note = 2'-O-methylcytidine-3'-phosphate
  modified_base 3: mod_base = OTHER; note = 2'-deoxy-2'-fluoroguanosine-3'-phosphate
  modified_base 4: mod_base = OTHER; note = 2'-O-methylguanosine-3'-phosphate
  modified_base 5: mod_base = OTHER; note = 2'-deoxy-2'-fluorocytidine-3'-phosphate
  modified_base 6: mod_base = OTHER; note = 2'-O-methyladenosine-3'-phosphate
  modified_base 7: mod_base = OTHER; note = 2'-deoxy-2'-fluorocytidine-3'-phosphate
  modified_base 8: mod_base = OTHER; note = 2'-O-methylcytidine-3'-phosphate
  modified_base 9: mod_base = OTHER; note = 2'-deoxy-2'-fluorocytidine-3'-phosphate
  modified_base 10: mod_base = OTHER; note = 2'-O-methyluridine-3'-phosphate
  modified_base 11: mod_base = OTHER; note = 2'-deoxy-2'-fluorocytidine-3'-phosphate
  modified_base 12: mod_base = OTHER; note = 2'-O-methyladenosine-3'-phosphate
  modified_base 13: mod_base = OTHER; note = 2'-deoxy-2'-fluorouridine-3'-phosphate
  modified_base 14: mod_base = OTHER; note = 2'-O-methyladenosine-3'-phosphate
  modified_base 15: mod_base = OTHER; note = 2'-deoxy-2'-fluoroguanosine-3'-phosphate
  modified_base 16: mod_base = OTHER; note = 2'-O-methylguanosine-3'-phosphate
  modified_base 17: mod_base = OTHER; note = 2'-deoxy-2'-fluorocytidine-3'-phosphate
  modified_base 18: mod_base = OTHER; note = 2'-O-methylcytidine-3'-phosphate
  modified_base 19: mod_base = OTHER; note = 2'-deoxy-2'-fluorouridine-3'-phosphate
  modified_base 20: mod_base = OTHER; note = 2'-deoxythymidine-3'-phosphorothioate
  misc_feature 1..19: note = RNA
  misc_feature 20..21: note = DNA
gcggcaccctcataggccttt

SEQ ID NO: 746 - DNA, 21 bp, synthetic construct
  source 1..21: mol_type = other DNA
  modified_base 1: mod_base = OTHER; note = adenosine-3'-phosphate
  modified_base 2: mod_base = OTHER; note = guanosine-3'-phosphate
  modified_base 3: mod_base = OTHER; note = guanosine-3'-phosphate
  modified_base 4: mod_base = OTHER; note = cytidine-3'-phosphate
  modified_base 5: mod_base = OTHER; note = cytidine-3'-phosphate
  modified_base 6: mod_base = OTHER; note = 2'-O-methyluridine-3'-phosphate
  modified_base 7: mod_base = OTHER; note = 2'-O-methyladenosine-3'-phosphate
  modified_base 8: mod_base = OTHER; note = uridine-3'-phosphate
  modified_base 9: mod_base = OTHER; note = guanosine-3'-phosphate
  modified_base 10: mod_base = OTHER; note = 2'-O-methyladenosine-3'-phosphate
  modified_base 11: mod_base = OTHER; note = 2'-O-methylguanosine-3'-phosphate
  modified_base 12: mod_base = OTHER; note = guanosine-3'-phosphate
  modified_base 13: mod_base = OTHER; note = guanosine-3'-phosphate
  modified_base 14: mod_base = OTHER; note = uridine-3'-phosphate
  modified_base 15: mod_base = OTHER; note = guanosine-3'-phosphate
  modified_base 16: mod_base = OTHER; note = cytidine-3'-phosphate
  modified_base 17: mod_base = OTHER; note = 2'-O-methylcytidine-3'-phosphate
  modified_base 18: mod_base = OTHER; note = 2'-O-methylguanosine-3'-phosphate
  modified_base 19: mod_base = OTHER; note = 2'-O-methylcytidine-3'-phosphate
  modified_base 20: mod_base = OTHER; note = 2'-deoxythymidine-3'-phosphorothioate
  misc_feature 1..19: note = RNA
  misc_feature 20..21: note = DNA
aggcctatgagggtgccgctt

SEQ ID NO: 747 - DNA, 21 bp, synthetic construct
  source 1..21: mol_type = other DNA
  modified_base 1: mod_base = OTHER; note = guanosine-3'-phosphate
  modified_base 2: mod_base = OTHER; note = 2'-deoxy-2'-fluorocytidine-3'-phosphate
  modified_base 3: mod_base = OTHER; note = guanosine-3'-phosphate
  modified_base 4: mod_base = OTHER; note = guanosine-3'-phosphate
  modified_base 5: mod_base = OTHER; note = 2'-deoxy-2'-fluorocytidine-3'-phosphate
  modified_base 6: mod_base = OTHER; note = adenosine-3'-phosphate
  modified_base 7: mod_base = OTHER; note = 2'-deoxy-2'-fluorocytidine-3'-phosphate
  modified_base 8: mod_base = OTHER; note = 2'-deoxy-2'-fluorocytidine-3'-phosphate
  modified_base 9: mod_base = OTHER; note = 2'-deoxy-2'-fluorocytidine-3'-phosphate
  modified_base 10: mod_base = OTHER; note = 2'-deoxy-2'-fluorouridine-3'-phosphate
  modified_base 11: mod_base = OTHER; note = 2'-deoxy-2'-fluorocytidine-3'-phosphate
  modified_base 12: mod_base = OTHER; note = adenosine-3'-phosphate
  modified_base 13: mod_base = OTHER; note = 2'-deoxy-2'-fluorouridine-3'-phosphate
  modified_base 14: mod_base = OTHER; note = adenosine-3'-phosphate
  modified_base 15: mod_base = OTHER; note = guanosine-3'-phosphate
  modified_base 16: mod_base = OTHER; note = guanosine-3'-phosphate
  modified_base 17: mod_base = OTHER; note = 2'-deoxy-2'-fluorocytidine-3'-phosphate
  modified_base 18: mod_base = OTHER; note = 2'-deoxy-2'-fluorocytidine-3'-phosphate
  modified_base 19: mod_base = OTHER; note = 2'-deoxy-2'-fluorouridine-3'-phosphate
  modified_base 20: mod_base = OTHER; note = 2'-deoxythymidine-3'-phosphorothioate
  misc_feature 1..19: note = RNA
  misc_feature 20..21: note = DNA
gcggcaccctcataggccttt

SEQ ID NO: 748 - DNA, 21 bp, synthetic construct
  source 1..21: mol_type = other DNA
  modified_base 1: mod_base = OTHER; note = adenosine-3'-phosphate
  modified_base 2: mod_base = OTHER; note = guanosine-3'-phosphate
  modified_base 3: mod_base = OTHER; note = guanosine-3'-phosphate
  modified_base 4: mod_base = OTHER; note = cytidine-3'-phosphate
  modified_base 5: mod_base = OTHER; note = cytidine-3'-phosphate
  modified_base 6: mod_base = OTHER; note = 2'-O-methyluridine-3'-phosphate
  modified_base 7: mod_base = OTHER; note = 2'-O-methyladenosine-3'-phosphate
  modified_base 8: mod_base = OTHER; note = uridine-3'-phosphate
  modified_base 9: mod_base = OTHER; note = guanosine-3'-phosphate
  modified_base 10: mod_base = OTHER; note = 2'-O-methyladenosine-3'-phosphate
  modified_base 11: mod_base = OTHER; note = 2'-O-methylguanosine-3'-phosphate
  modified_base 12: mod_base = OTHER; note = guanosine-3'-phosphate
  modified_base 13: mod_base = OTHER; note = guanosine-3'-phosphate
  modified_base 14: mod_base = OTHER; note = uridine-3'-phosphate
  modified_base 15: mod_base = OTHER; note = guanosine-3'-phosphate
  modified_base 16: mod_base = OTHER; note = cytidine-3'-phosphate
  modified_base 17: mod_base = OTHER; note = 2'-O-methylcytidine-3'-phosphate
  modified_base 18: mod_base = OTHER; note = 2'-O-methylguanosine-3'-phosphate
  modified_base 19: mod_base = OTHER; note = 2'-O-methylcytidine-3'-phosphate
  modified_base 20: mod_base = OTHER; note = 2'-deoxythymidine-3'-phosphorothioate
  misc_feature 1..19: note = RNA
  misc_feature 20..21: note = DNA
aggcctatgagggtgccgctt

SEQ ID NO: 749 - DNA, 21 bp, synthetic construct
  source 1..21: mol_type = other DNA
  modified_base 1: mod_base = OTHER; note = guanosine-3'-phosphate
  modified_base 2: mod_base = OTHER; note = 2'-O-methylcytidine-3'-phosphate
  modified_base 3: mod_base = OTHER; note = guanosine-3'-phosphate
  modified_base 4: mod_base = OTHER; note = 2'-O-methylguanosine-3'-phosphate
  modified_base 5: mod_base = OTHER; note = cytidine-3'-phosphate
  modified_base 6: mod_base = OTHER; note = 2'-O-methyladenosine-3'-phosphate
  modified_base 7: mod_base = OTHER; note = cytidine-3'-phosphate
  modified_base 8: mod_base = OTHER; note = 2'-O-methylcytidine-3'-phosphate
  modified_base 9: mod_base = OTHER; note = cytidine-3'-phosphate
  modified_base 10: mod_base = OTHER; note = 2'-O-methyluridine-3'-phosphate
  modified_base 11: mod_base = OTHER; note = cytidine-3'-phosphate
  modified_base 12: mod_base = OTHER; note = 2'-O-methyladenosine-3'-phosphate
  modified_base 13: mod_base = OTHER; note = uridine-3'-phosphate
  modified_base 14: mod_base = OTHER; note = 2'-O-methyladenosine-3'-phosphate
  modified_base 15: mod_base = OTHER; note = guanosine-3'-phosphate
  modified_base 16: mod_base = OTHER; note = 2'-O-methylguanosine-3'-phosphate
  modified_base 17: mod_base = OTHER; note = cytidine-3'-phosphate
  modified_base 18: mod_base = OTHER; note = 2'-O-methylcytidine-3'-phosphate
  modified_base 19: mod_base = OTHER; note = uridine-3'-phosphate
  modified_base 20: mod_base = OTHER; note = 2'-deoxythymidine-3'-phosphorothioate
  misc_feature 1..19: note = RNA
  misc_feature 20..21: note = DNA
gcggcaccctcataggccttt

SEQ ID NO: 750 - DNA, 21 bp, synthetic construct
  source 1..21: mol_type = other DNA
  modified_base 1: mod_base = OTHER; note = adenosine-3'-phosphate
  modified_base 2: mod_base = OTHER; note = guanosine-3'-phosphate
  modified_base 3: mod_base = OTHER; note = guanosine-3'-phosphate
  modified_base 4: mod_base = OTHER; note = cytidine-3'-phosphate
  modified_base 5: mod_base = OTHER; note = cytidine-3'-phosphate
  modified_base 6: mod_base = OTHER; note = 2'-O-methyluridine-3'-phosphate
  modified_base 7: mod_base = OTHER; note = 2'-O-methyladenosine-3'-phosphate
  modified_base 8: mod_base = OTHER; note = uridine-3'-phosphate
  modified_base 9: mod_base = OTHER; note = guanosine-3'-phosphate
  modified_base 10: mod_base = OTHER; note = 2'-O-methyladenosine-3'-phosphate
  modified_base 11: mod_base = OTHER; note = 2'-O-methylguanosine-3'-phosphate
  modified_base 12: mod_base = OTHER; note = guanosine-3'-phosphate
  modified_base 13: mod_base = OTHER; note = guanosine-3'-phosphate
  modified_base 14: mod_base = OTHER; note = uridine-3'-phosphate
  modified_base 15: mod_base = OTHER; note = guanosine-3'-phosphate
  modified_base 16: mod_base = OTHER; note = cytidine-3'-phosphate
  modified_base 17: mod_base = OTHER; note = 2'-O-methylcytidine-3'-phosphate
  modified_base 18: mod_base = OTHER; note = 2'-O-methylguanosine-3'-phosphate
  modified_base 19: mod_base = OTHER; note = 2'-O-methylcytidine-3'-phosphate
  modified_base 20: mod_base = OTHER; note = 2'-deoxythymidine-3'-phosphorothioate
  misc_feature 1..19: note = RNA
  misc_feature 20..21: note = DNA
aggcctatgagggtgccgctt

SEQ ID NO: 751 - DNA, 21 bp, synthetic construct
  source 1..21: mol_type = other DNA
  modified_base 1: mod_base = OTHER; note = adenosine-3'-phosphate
  modified_base 2: mod_base = OTHER; note = adenosine-3'-phosphate
  modified_base 3: mod_base = OTHER; note = guanosine-3'-phosphate
  modified_base 4: mod_base = OTHER; note = guanosine-3'-phosphate
  modified_base 5: mod_base = OTHER; note = adenosine-3'-phosphate
  modified_base 6: mod_base = OTHER; note = guanosine-3'-phosphate
  modified_base 7: mod_base = OTHER; note = cytidine-3'-phosphate
  modified_base 8: mod_base = OTHER; note = adenosine-3'-phosphate
  modified_base 9: mod_base = OTHER; note = uridine-3'-phosphate
  modified_base 10: mod_base = OTHER; note = guanosine-3'-phosphate
  modified_base 11: mod_base = OTHER; note = guanosine-3'-phosphate
  modified_base 12: mod_base = OTHER; note = adenosine-3'-phosphate
  modified_base 13: mod_base = OTHER; note = adenosine-3'-phosphate
  modified_base 14: mod_base = OTHER; note = uridine-3'-phosphate
  modified_base 15: mod_base = OTHER; note = cytidine-3'-phosphate
  modified_base 16: mod_base = OTHER; note = cytidine-3'-phosphate
  modified_base 17: mod_base = OTHER; note = cytidine-3'-phosphate
  modified_base 18: mod_base = OTHER; note = guanosine-3'-phosphate
  modified_base 19: mod_base = OTHER; note = guanosine-3'-phosphate
  modified_base 20: mod_base = OTHER; note = 2'-deoxythymidine-3'-phosphorothioate
  misc_feature 1..19: note = RNA
  misc_feature 20..21: note = DNA
aaggagcatggaatcccggtt

SEQ ID NO: 752 - DNA, 21 bp, synthetic construct
  source 1..21: mol_type = other DNA
  modified_base 1: mod_base = OTHER; note = cytidine-3'-phosphate
  modified_base 2: mod_base = OTHER; note = cytidine-3'-phosphate
  modified_base 3: mod_base = OTHER; note = guanosine-3'-phosphate
  modified_base 4: mod_base = OTHER; note = guanosine-3'-phosphate
  modified_base 5: mod_base = OTHER; note = guanosine-3'-phosphate
  modified_base 6: mod_base = OTHER; note = adenosine-3'-phosphate
  modified_base 7: mod_base = OTHER; note = uridine-3'-phosphate
  modified_base 8: mod_base = OTHER; note = uridine-3'-phosphate
  modified_base 9: mod_base = OTHER; note = cytidine-3'-phosphate
  modified_base 10: mod_base = OTHER; note = cytidine-3'-phosphate
  modified_base 11: mod_base = OTHER; note = adenosine-3'-phosphate
  modified_base 12: mod_base = OTHER; note = uridine-3'-phosphate
  modified_base 13: mod_base = OTHER; note = guanosine-3'-phosphate
  modified_base 14: mod_base = OTHER; note = cytidine-3'-phosphate
  modified_base 15: mod_base = OTHER; note = uridine-3'-phosphate
  modified_base 16: mod_base = OTHER; note = cytidine-3'-phosphate
  modified_base 17: mod_base = OTHER; note = cytidine-3'-phosphate
  modified_base 18: mod_base = OTHER; note = uridine-3'-phosphate
  modified_base 19: mod_base = OTHER; note = uridine-3'-phosphate
  modified_base 20: mod_base = OTHER; note = 2'-deoxythymidine-3'-phosphorothioate
  misc_feature 1..19: note = RNA
  misc_feature 20..21: note = DNA
ccgggattccatgctcctttt

SEQ ID NO: 753 - DNA, 21 bp, synthetic construct
  source 1..21: mol_type = other DNA
  modified_base 1: mod_base = OTHER; note = adenosine-3'-phosphate
  modified_base 2: mod_base = OTHER; note = adenosine-3'-phosphate
  modified_base 3: mod_base = OTHER; note = guanosine-3'-phosphate
  modified_base 4: mod_base = OTHER; note = guanosine-3'-phosphate
  modified_base 5: mod_base = OTHER; note = adenosine-3'-phosphate
  modified_base 6: mod_base = OTHER; note = guanosine-3'-phosphate
  modified_base 7: mod_base = OTHER; note = 2'-O-methylcytidine-3'-phosphate
  modified_base 8: mod_base = OTHER; note = adenosine-3'-phosphate
  modified_base 9: mod_base = OTHER; note = 2'-O-methyluridine-3'-phosphate
  modified_base 10: mod_base = OTHER; note = guanosine-3'-phosphate
  modified_base 11: mod_base = OTHER; note = guanosine-3'-phosphate
  modified_base 12: mod_base = OTHER; note = adenosine-3'-phosphate
  modified_base 13: mod_base = OTHER; note = adenosine-3'-phosphate
  modified_base 14: mod_base = OTHER; note = 2'-O-methyluridine-3'-phosphate
  modified_base 15: mod_base = OTHER; note = 2'-O-methylcytidine-3'-phosphate
  modified_base 16: mod_base = OTHER; note = 2'-O-methylcytidine-3'-phosphate
  modified_base 17: mod_base = OTHER; note = 2'-O-methylcytidine-3'-phosphate
  modified_base 18: mod_base = OTHER; note = guanosine-3'-phosphate
  modified_base 19: mod_base = OTHER; note = guanosine-3'-phosphate
  modified_base 20: mod_base = OTHER; note = 2'-deoxythymidine-3'-phosphorothioate
  misc_feature 1..19: note = RNA
  misc_feature 20..21: note = DNA
aaggagcatggaatcccggtt

SEQ ID NO: 754 - DNA, 21 bp, synthetic construct
  source 1..21: mol_type = other DNA
  modified_base 1: mod_base = OTHER; note = cytidine-3'-phosphate
  modified_base 2: mod_base = OTHER; note = cytidine-3'-phosphate
  modified_base 3: mod_base = OTHER; note = guanosine-3'-phosphate
  modified_base 4: mod_base = OTHER; note = guanosine-3'-phosphate
  modified_base 5: mod_base = OTHER; note = guanosine-3'-phosphate
  modified_base 6: mod_base = OTHER; note = adenosine-3'-phosphate
  modified_base 7: mod_base = OTHER; note = uridine-3'-phosphate
  modified_base 8: mod_base = OTHER; note = uridine-3'-phosphate
  modified_base 9: mod_base = OTHER; note = cytidine-3'-phosphate
  modified_base 10: mod_base = OTHER; note = 2'-O-methylcytidine-3'-phosphate
  modified_base 11: mod_base = OTHER; note = adenosine-3'-phosphate
  modified_base 12: mod_base = OTHER; note = uridine-3'-phosphate
  modified_base 13: mod_base = OTHER; note = guanosine-3'-phosphate
  modified_base 14: mod_base = OTHER; note = cytidine-3'-phosphate
  modified_base 15: mod_base = OTHER; note = uridine-3'-phosphate
  modified_base 16: mod_base = OTHER; note = cytidine-3'-phosphate
  modified_base 17: mod_base = OTHER; note = cytidine-3'-phosphate
  modified_base 18: mod_base = OTHER; note = uridine-3'-phosphate
  modified_base 19: mod_base = OTHER; note = uridine-3'-phosphate
  modified_base 20: mod_base = OTHER; note = 2'-deoxythymidine-3'-phosphorothioate
  misc_feature 1..19: note = RNA
  misc_feature 20..21: note = DNA
ccgggattccatgctcctttt

SEQ ID NO: 755 - DNA, 21 bp, synthetic construct
  source 1..21: mol_type = other DNA
  modified_base 1: mod_base = OTHER; note = adenosine-3'-phosphate
  modified_base 2: mod_base = OTHER; note = guanosine-3'-phosphate
  modified_base 3: mod_base = OTHER; note = guanosine-3'-phosphate
  modified_base 4: mod_base = OTHER; note = adenosine-3'-phosphate
  modified_base 5: mod_base = OTHER; note = guanosine-3'-phosphate
  modified_base 6: mod_base = OTHER; note = cytidine-3'-phosphate
  modified_base 7: mod_base = OTHER; note = adenosine-3'-phosphate
  modified_base 8: mod_base = OTHER; note = uridine-3'-phosphate
  modified_base 9: mod_base = OTHER; note = guanosine-3'-phosphate
  modified_base 10: mod_base = OTHER; note = guanosine-3'-phosphate
  modified_base 11: mod_base = OTHER; note = adenosine-3'-phosphate
  modified_base 12: mod_base = OTHER; note = adenosine-3'-phosphate
  modified_base 13: mod_base = OTHER; note = uridine-3'-phosphate
  modified_base 14: mod_base = OTHER; note = cytidine-3'-phosphate
  modified_base 15: mod_base = OTHER; note = cytidine-3'-phosphate
  modified_base 16: mod_base = OTHER; note = cytidine-3'-phosphate
  modified_base 17: mod_base = OTHER; note = guanosine-3'-phosphate
  modified_base 18: mod_base = OTHER; note = guanosine-3'-phosphate
  modified_base 19: mod_base = OTHER; note = cytidine-3'-phosphate
  modified_base 20: mod_base = OTHER; note = 2'-deoxythymidine-3'-phosphorothioate
  misc_feature 1..19: note = RNA
  misc_feature 20..21: note = DNA
aggagcatggaatcccggctt

SEQ ID NO: 756 - DNA, 21 bp, synthetic construct
  source 1..21: mol_type = other DNA
  modified_base 1: mod_base = OTHER; note = guanosine-3'-phosphate
  modified_base 2: mod_base = OTHER; note = cytidine-3'-phosphate
  modified_base 3: mod_base = OTHER; note = cytidine-3'-phosphate
  modified_base 4: mod_base = OTHER; note = guanosine-3'-phosphate
  modified_base 5: mod_base = OTHER; note = guanosine-3'-phosphate
  modified_base 6: mod_base = OTHER; note = guanosine-3'-phosphate
  modified_base 7: mod_base = OTHER; note = adenosine-3'-phosphate
  modified_base 8: mod_base = OTHER; note = uridine-3'-phosphate
  modified_base 9: mod_base = OTHER; note = uridine-3'-phosphate
  modified_base 10: mod_base = OTHER; note = cytidine-3'-phosphate
  modified_base 11: mod_base = OTHER; note = cytidine-3'-phosphate
  modified_base 12: mod_base = OTHER; note = adenosine-3'-phosphate
  modified_base 13: mod_base = OTHER; note = uridine-3'-phosphate
  modified_base 14: mod_base = OTHER; note = guanosine-3'-phosphate
  modified_base 15: mod_base = OTHER; note = cytidine-3'-phosphate
  modified_base 16: mod_base = OTHER; note = uridine-3'-phosphate
  modified_base 17: mod_base = OTHER; note = cytidine-3'-phosphate
  modified_base 18: mod_base = OTHER; note = cytidine-3'-phosphate
  modified_base 19: mod_base = OTHER; note = uridine-3'-phosphate
  modified_base 20: mod_base = OTHER; note = 2'-deoxythymidine-3'-phosphorothioate
  misc_feature 1..19: note = RNA
  misc_feature 20..21: note = DNA
gccgggattccatgctccttt

SEQ ID NO: 757 - DNA, 21 bp, synthetic construct
  source 1..21: mol_type = other DNA
  modified_base 1: mod_base = OTHER; note = adenosine-3'-phosphate
  modified_base 2: mod_base = OTHER; note = guanosine-3'-phosphate
  modified_base 3: mod_base = OTHER; note = guanosine-3'-phosphate
  modified_base 4: mod_base = OTHER; note = adenosine-3'-phosphate
  modified_base 5: mod_base = OTHER; note = guanosine-3'-phosphate
  modified_base 6: mod_base = OTHER; note = 2'-O-methylcytidine-3'-phosphate
  modified_base 7: mod_base = OTHER; note = adenosine-3'-phosphate
  modified_base 8: mod_base = OTHER; note = 2'-O-methyluridine-3'-phosphate
  modified_base 9: mod_base = OTHER; note = guanosine-3'-phosphate
  modified_base 10: mod_base = OTHER; note = guanosine-3'-phosphate
  modified_base 11: mod_base = OTHER; note = adenosine-3'-phosphate
  modified_base 12: mod_base = OTHER; note = adenosine-3'-phosphate
  modified_base 13: mod_base = OTHER; note = 2'-O-methyluridine-3'-phosphate
  modified_base 14: mod_base = OTHER; note = 2'-O-methylcytidine-3'-phosphate
  modified_base 15: mod_base = OTHER; note = 2'-O-methylcytidine-3'-phosphate
  modified_base 16: mod_base = OTHER; note = 2'-O-methylcytidine-3'-phosphate
  modified_base 17: mod_base = OTHER; note = guanosine-3'-phosphate
  modified_base 18: mod_base = OTHER; note = guanosine-3'-phosphate
  modified_base 19: mod_base = OTHER; note = 2'-O-methylcytidine-3'-phosphate
  modified_base 20: mod_base = OTHER; note = 2'-deoxythymidine-3'-phosphorothioate
  misc_feature 1..19: note = RNA
  misc_feature 20..21: note = DNA
aggagcatggaatcccggctt

SEQ ID NO: 758 - DNA, 21 bp, synthetic construct
  source 1..21: mol_type = other DNA
  modified_base 1: mod_base = OTHER; note = guanosine-3'-phosphate
  modified_base 2: mod_base = OTHER; note = cytidine-3'-phosphate
  modified_base 3: mod_base = OTHER; note = cytidine-3'-phosphate
  modified_base 4: mod_base = OTHER; note = guanosine-3'-phosphate
  modified_base 5: mod_base = OTHER; note = guanosine-3'-phosphate
  modified_base 6: mod_base = OTHER; note = guanosine-3'-phosphate
  modified_base 7: mod_base = OTHER; note = adenosine-3'-phosphate
  modified_base 8: mod_base = OTHER; note = uridine-3'-phosphate
  modified_base 9: mod_base = OTHER; note = uridine-3'-phosphate
  modified_base 10: mod_base = OTHER; note = cytidine-3'-phosphate
  modified_base 11: mod_base = OTHER; note = 2'-O-methylcytidine-3'-phosphate
  modified_base 12: mod_base = OTHER; note = adenosine-3'-phosphate
  modified_base 13: mod_base = OTHER; note = uridine-3'-phosphate
  modified_base 14: mod_base = OTHER; note = guanosine-3'-phosphate
  modified_base 15: mod_base = OTHER; note = cytidine-3'-phosphate
  modified_base 16: mod_base = OTHER; note = uridine-3'-phosphate
  modified_base 17: mod_base = OTHER; note = cytidine-3'-phosphate
  modified_base 18: mod_base = OTHER; note = cytidine-3'-phosphate
  modified_base 19: mod_base = OTHER; note = uridine-3'-phosphate
  modified_base 20: mod_base = OTHER; note = 2'-deoxythymidine-3'-phosphorothioate
  misc_feature 1..19: note = RNA
  misc_feature 20..21: note = DNA
gccgggattccatgctccttt

SEQ ID NO: 759 - DNA, 21 bp, synthetic construct
  source 1..21: mol_type = other DNA
  modified_base 1: mod_base = OTHER; note = guanosine-3'-phosphate
  modified_base 2: mod_base = OTHER; note = adenosine-3'-phosphate
  modified_base 3: mod_base = OTHER; note = guanosine-3'-phosphate
  modified_base 4: mod_base = OTHER; note = cytidine-3'-phosphate
  modified_base 5: mod_base = OTHER; note = adenosine-3'-phosphate
  modified_base 6: mod_base = OTHER; note = uridine-3'-phosphate
  modified_base 7: mod_base = OTHER; note = guanosine-3'-phosphate
  modified_base 8: mod_base = OTHER; note = guanosine-3'-phosphate
  modified_base 9: mod_base = OTHER; note = adenosine-3'-phosphate
  modified_base 10: mod_base = OTHER; note = adenosine-3'-phosphate
  modified_base 11: mod_base = OTHER; note = uridine-3'-phosphate
  modified_base 12: mod_base = OTHER; note = cytidine-3'-phosphate
  modified_base 13: mod_base = OTHER; note = cytidine-3'-phosphate
  modified_base 14: mod_base = OTHER; note = cytidine-3'-phosphate
  modified_base 15: mod_base = OTHER; note = guanosine-3'-phosphate
  modified_base 16: mod_base = OTHER; note = guanosine-3'-phosphate
  modified_base 17: mod_base = OTHER; note = cytidine-3'-phosphate
  modified_base 18: mod_base = OTHER; note = cytidine-3'-phosphate
  modified_base 19: mod_base = OTHER; note = cytidine-3'-phosphate
  modified_base 20: mod_base = OTHER; note = 2'-deoxythymidine-3'-phosphorothioate
  misc_feature 1..19: note = RNA
  misc_feature 20..21: note = DNA
gagcatggaatcccggccctt

SEQ ID NO: 760 - DNA, 21 bp, synthetic construct
  source 1..21: mol_type = other DNA
  modified_base 1: mod_base = OTHER; note = guanosine-3'-phosphate
  modified_base 2: mod_base = OTHER; note = guanosine-3'-phosphate
  modified_base 3: mod_base = OTHER; note = guanosine-3'-phosphate
  modified_base 4: mod_base = OTHER; note = cytidine-3'-phosphate
  modified_base 5: mod_base = OTHER; note = cytidine-3'-phosphate
  modified_base 6: mod_base = OTHER; note = guanosine-3'-phosphate
  modified_base 7: mod_base = OTHER; note = guanosine-3'-phosphate
  modified_base 8: mod_base = OTHER; note = guanosine-3'-phosphate
  modified_base 9: mod_base = OTHER; note = adenosine-3'-phosphate
  modified_base 10: mod_base = OTHER; note = uridine-3'-phosphate
  modified_base 11: mod_base = OTHER; note = uridine-3'-phosphate
  modified_base 12: mod_base = OTHER; note = cytidine-3'-phosphate
  modified_base 13: mod_base = OTHER; note = cytidine-3'-phosphate
  modified_base 14: mod_base = OTHER; note = adenosine-3'-phosphate
  modified_base 15: mod_base = OTHER; note = uridine-3'-phosphate
  modified_base 16: mod_base = OTHER; note = guanosine-3'-phosphate
  modified_base 17: mod_base = OTHER; note = cytidine-3'-phosphate
  modified_base 18: mod_base = OTHER; note = uridine-3'-phosphate
  modified_base 19: mod_base = OTHER; note = cytidine-3'-phosphate
  modified_base 20: mod_base = OTHER; note = 2'-deoxythymidine-3'-phosphorothioate
  misc_feature 1..19: note = RNA
  misc_feature 20..21: note = DNA
gggccgggattccatgctctt

SEQ ID NO: 761 - DNA, 21 bp, synthetic construct
  source 1..21: mol_type = other DNA
  modified_base 1: mod_base = OTHER; note = guanosine-3'-phosphate
  modified_base 2: mod_base = OTHER; note = adenosine-3'-phosphate
  modified_base 3: mod_base = OTHER; note = guanosine-3'-phosphate
  modified_base 4: mod_base = OTHER; note = 2'-O-methylcytidine-3'-phosphate
  modified_base 5: mod_base = OTHER; note = adenosine-3'-phosphate
  modified_base 6: mod_base = OTHER; note = 2'-O-methyluridine-3'-phosphate
  modified_base 7: mod_base = OTHER; note = guanosine-3'-phosphate
  modified_base 8: mod_base = OTHER; note = guanosine-3'-phosphate
  modified_base 9: mod_base = OTHER; note = adenosine-3'-phosphate
  modified_base 10: mod_base = OTHER; note = adenosine-3'-phosphate
  modified_base 11: mod_base = OTHER; note = 2'-O-methyluridine-3'-phosphate
  modified_base 12: mod_base = OTHER; note = 2'-O-methylcytidine-3'-phosphate
  modified_base 13: mod_base = OTHER; note = 2'-O-methylcytidine-3'-phosphate
  modified_base 14: mod_base = OTHER; note = 2'-O-methylcytidine-3'-phosphate
  modified_base 15: mod_base = OTHER; note = guanosine-3'-phosphate
  modified_base 16: mod_base = OTHER; note = guanosine-3'-phosphate
  modified_base 17: mod_base = OTHER; note = 2'-O-methylcytidine-3'-phosphate
  modified_base 18: mod_base = OTHER; note = 2'-O-methylcytidine-3'-phosphate
  modified_base 19: mod_base = OTHER; note = 2'-O-methylcytidine-3'-phosphate
  modified_base 20: mod_base = OTHER; note = 2'-deoxythymidine-3'-phosphorothioate
  misc_feature 1..19: note = RNA
  misc_feature 20..21: note = DNA
gagcatggaatcccggccctt

SEQ ID NO: 762 - DNA, 21 bp, synthetic construct
  source 1..21: mol_type = other DNA
  modified_base 1: mod_base = OTHER; note = guanosine-3'-phosphate
  modified_base 2: mod_base = OTHER; note = guanosine-3'-phosphate
  modified_base 3: mod_base = OTHER; note = guanosine-3'-phosphate
  modified_base 4: mod_base = OTHER; note = cytidine-3'-phosphate
  modified_base 5: mod_base = OTHER; note = cytidine-3'-phosphate
  modified_base 6: mod_base = OTHER; note = guanosine-3'-phosphate
  modified_base 7: mod_base = OTHER; note = guanosine-3'-phosphate
  modified_base 8: mod_base = OTHER; note = guanosine-3'-phosphate
  modified_base 9: mod_base = OTHER; note = adenosine-3'-phosphate
  modified_base 10: mod_base = OTHER; note = uridine-3'-phosphate
  modified_base 11: mod_base = OTHER; note = uridine-3'-phosphate
  modified_base 12: mod_base = OTHER; note = cytidine-3'-phosphate
  modified_base 13: mod_base = OTHER; note = 2'-O-methylcytidine-3'-phosphate
  modified_base 14: mod_base = OTHER; note = adenosine-3'-phosphate
  modified_base 15: mod_base = OTHER; note = uridine-3'-phosphate
  modified_base 16: mod_base = OTHER; note = guanosine-3'-phosphate
  modified_base 17: mod_base = OTHER; note = cytidine-3'-phosphate
  modified_base 18: mod_base = OTHER; note = uridine-3'-phosphate
  modified_base 19: mod_base = OTHER; note = cytidine-3'-phosphate
  modified_base 20: mod_base = OTHER; note = 2'-deoxythymidine-3'-phosphorothioate
  misc_feature 1..19: note = RNA
  misc_feature 20..21: note = DNA
gggccgggattccatgctctt

SEQ ID NO: 763 - DNA, 21 bp, synthetic construct
  source 1..21: mol_type = other DNA
  modified_base 1: mod_base = OTHER; note = guanosine-3'-phosphate
  modified_base 2: mod_base = OTHER; note = cytidine-3'-phosphate
  modified_base 3: mod_base = OTHER; note = cytidine-3'-phosphate
  modified_base 4: mod_base = OTHER; note = uridine-3'-phosphate
  modified_base 5: mod_base = OTHER; note = adenosine-3'-phosphate
  modified_base 6: mod_base = OTHER; note = cytidine-3'-phosphate
  modified_base 7: mod_base = OTHER; note = guanosine-3'-phosphate
  modified_base 8: mod_base = OTHER; note = cytidine-3'-phosphate
  modified_base 9: mod_base = OTHER; note = cytidine-3'-phosphate
  modified_base 10: mod_base = OTHER; note = guanosine-3'-phosphate
  modified_base 11: mod_base = OTHER; note = uridine-3'-phosphate
  modified_base 12: mod_base = OTHER; note = adenosine-3'-phosphate
  modified_base 13: mod_base = OTHER; note = guanosine-3'-phosphate
  modified_base 14: mod_base = OTHER; note = adenosine-3'-phosphate
  modified_base 15: mod_base = OTHER; note = cytidine-3'-phosphate
  modified_base 16: mod_base = OTHER; note = adenosine-3'-phosphate
  modified_base 17: mod_base = OTHER; note = adenosine-3'-phosphate
  modified_base 18: mod_base = OTHER; note = cytidine-3'-phosphate
  modified_base 19: mod_base = OTHER; note = adenosine-3'-phosphate
  misc_feature 1..19: note = RNA
  misc_feature 20..21: note = DNA
gcctacgccgtagacaacatt

SEQ ID NO: 764 - DNA, 21 bp, synthetic construct
  source 1..21: mol_type = other DNA
  modified_base 1: mod_base = OTHER; note = uridine-3'-phosphate
  modified_base 2: mod_base = OTHER; note = guanosine-3'-phosphate
  modified_base 3: mod_base = OTHER; note = uridine-3'-phosphate
  modified_base 4: mod_base = OTHER; note = uridine-3'-phosphate
  modified_base 5: mod_base = OTHER; note = guanosine-3'-phosphate
  modified_base 6: mod_base = OTHER; note = uridine-3'-phosphate
  modified_base 7: mod_base = OTHER; note = cytidine-3'-phosphate
  modified_base 8: mod_base = OTHER; note = uridine-3'-phosphate
  modified_base 9: mod_base = OTHER; note = adenosine-3'-phosphate
  modified_base 10: mod_base = OTHER; note = cytidine-3'-phosphate
  modified_base 11: mod_base = OTHER; note = guanosine-3'-phosphate
  modified_base 12: mod_base = OTHER; note = guanosine-3'-phosphate
  modified_base 13: mod_base = OTHER; note = cytidine-3'-phosphate
  modified_base 14: mod_base = OTHER; note = guanosine-3'-phosphate
  modified_base 15: mod_base = OTHER; note = uridine-3'-phosphate
  modified_base 16: mod_base = OTHER; note = adenosine-3'-phosphate
  modified_base 17: mod_base = OTHER; note = guanosine-3'-phosphate
  modified_base 18: mod_base = OTHER; note = guanosine-3'-phosphate
  modified_base 19: mod_base = OTHER; note = cytidine-3'-phosphate
  misc_feature 1..19: note = RNA
  misc_feature 20..21: note = DNA
tgttgtctacggcgtaggctt

SEQ ID NO: 765 - DNA, 21 bp, synthetic construct
  source 1..21: mol_type = other DNA
  modified_base 1: mod_base = OTHER; note = cytidine-3'-phosphate
  modified_base 2: mod_base = OTHER; note = cytidine-3'-phosphate
  modified_base 3: mod_base = OTHER; note = uridine-3'-phosphate
  modified_base 4: mod_base = OTHER; note = adenosine-3'-phosphate
  modified_base 5: mod_base = OTHER; note = cytidine-3'-phosphate
  modified_base 6: mod_base = OTHER; note = guanosine-3'-phosphate
  modified_base 7: mod_base = OTHER; note = cytidine-3'-phosphate
  modified_base 8: mod_base = OTHER; note = cytidine-3'-phosphate
  modified_base 9: mod_base = OTHER; note = guanosine-3'-phosphate
  modified_base 10: mod_base = OTHER; note = uridine-3'-phosphate
  modified_base 11: mod_base = OTHER; note = adenosine-3'-phosphate
  modified_base 12: mod_base = OTHER; note = guanosine-3'-phosphate
  modified_base 13: mod_base = OTHER; note = adenosine-3'-phosphate
  modified_base 14: mod_base = OTHER; note = cytidine-3'-phosphate
  modified_base 15: mod_base = OTHER; note = adenosine-3'-phosphate
  modified_base 16: mod_base = OTHER; note = adenosine-3'-phosphate
  modified_base 17: mod_base = OTHER; note = cytidine-3'-phosphate
  modified_base 18: mod_base = OTHER; note = adenosine-3'-phosphate
  modified_base 19: mod_base = OTHER; note = cytidine-3'-phosphate
  misc_feature 1..19: note = RNA
  misc_feature 20..21: note = DNA
cctacgccgtagacaacactt

SEQ ID NO: 766 - DNA, 21 bp, synthetic construct
  source 1..21: mol_type = other DNA
  modified_base 1: mod_base = OTHER; note = guanosine-3'-phosphate
  modified_base 2: mod_base = OTHER; note = uridine-3'-phosphate
  modified_base 3: mod_base = OTHER; note = guanosine-3'-phosphate
  modified_base 4: mod_base = OTHER; note = uridine-3'-phosphate
  modified_base 5: mod_base = OTHER; note = uridine-3'-phosphate
  modified_base 6: mod_base = OTHER; note = guanosine-3'-phosphate
  modified_base 7: mod_base = OTHER; note = uridine-3'-phosphate
  modified_base 8: mod_base = OTHER; note = cytidine-3'-phosphate
  modified_base 9: mod_base = OTHER; note = uridine-3'-phosphate
  modified_base 10: mod_base = OTHER; note = adenosine-3'-phosphate
  modified_base 11: mod_base = OTHER; note = cytidine-3'-phosphate
  modified_base 12: mod_base = OTHER; note = guanosine-3'-phosphate
  modified_base 13: mod_base = OTHER; note = guanosine-3'-phosphate
  modified_base 14: mod_base = OTHER; note = cytidine-3'-phosphate
  modified_base 15: mod_base = OTHER; note = guanosine-3'-phosphate
  modified_base 16: mod_base = OTHER; note = uridine-3'-phosphate
  modified_base 17: mod_base = OTHER; note = adenosine-3'-phosphate
  modified_base 18: mod_base = OTHER; note = guanosine-3'-phosphate
  modified_base 19: mod_base = OTHER; note = guanosine-3'-phosphate
  misc_feature 1..19: note = RNA
  misc_feature 20..21: note = DNA
gtgttgtctacggcgtaggtt

SEQ ID NO: 767 - DNA, 21 bp, synthetic construct
  source 1..21: mol_type = other DNA
  modified_base 1: mod_base = OTHER; note = cytidine-3'-phosphate
  modified_base 2: mod_base = OTHER; note = uridine-3'-phosphate
  modified_base 3: mod_base = OTHER; note = adenosine-3'-phosphate
  modified_base 4: mod_base = OTHER; note = cytidine-3'-phosphate
  modified_base 5: mod_base = OTHER; note = guanosine-3'-phosphate
  modified_base 6: mod_base = OTHER; note = cytidine-3'-phosphate
  modified_base 7: mod_base = OTHER; note = cytidine-3'-phosphate
  modified_base 8: mod_base = OTHER; note = guanosine-3'-phosphate
  modified_base 9: mod_base = OTHER; note = uridine-3'-phosphate
  modified_base 10: mod_base = OTHER; note = adenosine-3'-phosphate
  modified_base 11: mod_base = OTHER; note = guanosine-3'-phosphate
  modified_base 12: mod_base = OTHER; note = adenosine-3'-phosphate
  modified_base 13: mod_base = OTHER; note = cytidine-3'-phosphate
  modified_base 14: mod_base = OTHER; note = adenosine-3'-phosphate
  modified_base 15: mod_base = OTHER; note = adenosine-3'-phosphate
  modified_base 16: mod_base = OTHER; note = cytidine-3'-phosphate
  modified_base 17: mod_base = OTHER; note = adenosine-3'-phosphate
  modified_base 18: mod_base = OTHER; note = cytidine-3'-phosphate
  modified_base 19: mod_base = OTHER; note = guanosine-3'-phosphate
  misc_feature 1..19: note = RNA
  misc_feature 20..21: note = DNA
ctacgccgtagacaacacgtt

SEQ ID NO: 768 - DNA, 21 bp, synthetic construct
  source 1..21: mol_type = other DNA
  modified_base 1: mod_base = OTHER; note = cytidine-3'-phosphate
  modified_base 2: mod_base = OTHER; note = guanosine-3'-phosphate
  modified_base 3: mod_base = OTHER; note = uridine-3'-phosphate
  modified_base 4: mod_base = OTHER; note = guanosine-3'-phosphate
  modified_base 5: mod_base = OTHER; note = uridine-3'-phosphate
  modified_base 6: mod_base = OTHER; note = uridine-3'-phosphate
  modified_base 7: mod_base = OTHER; note = guanosine-3'-phosphate
  modified_base 8: mod_base = OTHER; note = uridine-3'-phosphate
  modified_base 9: mod_base = OTHER; note = cytidine-3'-phosphate
  modified_base 10: mod_base = OTHER; note = uridine-3'-phosphate
  modified_base 11: mod_base = OTHER; note = adenosine-3'-phosphate
  modified_base 12: mod_base = OTHER; note = cytidine-3'-phosphate
  modified_base 13: mod_base = OTHER; note = guanosine-3'-phosphate
  modified_base 14: mod_base = OTHER; note = guanosine-3'-phosphate
  modified_base 15: mod_base = OTHER; note = cytidine-3'-phosphate
  modified_base 16: mod_base = OTHER; note = guanosine-3'-phosphate
  modified_base 17: mod_base = OTHER; note = uridine-3'-phosphate
  modified_base 18: mod_base = OTHER; note = adenosine-3'-phosphate
  modified_base 19: mod_base = OTHER; note = guanosine-3'-phosphate
  misc_feature 1..19: note = RNA
  misc_feature 20..21: note = DNA
cgtgttgtctacggcgtagtt

SEQ ID NO: 769 - DNA, 21 bp, synthetic construct
  source 1..21: mol_type = other DNA
  modified_base 1: mod_base = OTHER; note = uridine-3'-phosphate
  modified_base 2: mod_base = OTHER; note = adenosine-3'-phosphate
  modified_base 3: mod_base = OTHER; note = cytidine-3'-phosphate
  modified_base 4: mod_base = OTHER; note = guanosine-3'-phosphate
  modified_base 5: mod_base = OTHER; note = cytidine-3'-phosphate
  modified_base 6: mod_base = OTHER; note = cytidine-3'-phosphate
  modified_base 7: mod_base = OTHER; note = guanosine-3'-phosphate
  modified_base 8: mod_base = OTHER; note = uridine-3'-phosphate
  modified_base 9: mod_base = OTHER; note = adenosine-3'-phosphate
  modified_base 10: mod_base = OTHER; note = guanosine-3'-phosphate
  modified_base 11: mod_base = OTHER; note = adenosine-3'-phosphate
  modified_base 12: mod_base = OTHER; note = cytidine-3'-phosphate
  modified_base 13: mod_base = OTHER; note = adenosine-3'-phosphate
  modified_base 14: mod_base = OTHER; note = adenosine-3'-phosphate
  modified_base 15: mod_base = OTHER; note = cytidine-3'-phosphate
  modified_base 16: mod_base = OTHER; note = adenosine-3'-phosphate
  modified_base 17: mod_base = OTHER; note = cytidine-3'-phosphate
  modified_base 18: mod_base = OTHER; note = guanosine-3'-phosphate
  modified_base 19: mod_base = OTHER; note = uridine-3'-phosphate
  misc_feature 1..19: note = RNA
  misc_feature 20..21: note = DNA
tacgccgtagacaacacgttt

SEQ ID NO: 770 - DNA, 21 bp, synthetic construct
  source 1..21: mol_type = other DNA
  modified_base 1: mod_base = OTHER; note = adenosine-3'-phosphate
  modified_base 2: mod_base = OTHER; note = cytidine-3'-phosphate
  modified_base 3: mod_base = OTHER; note = guanosine-3'-phosphate
  modified_base 4: mod_base = OTHER; note = uridine-3'-phosphate
  modified_base 5: mod_base = OTHER; note = guanosine-3'-phosphate
  modified_base 6: mod_base = OTHER; note = uridine-3'-phosphate
  modified_base 7: mod_base = OTHER; note = uridine-3'-phosphate
  modified_base 8: mod_base = OTHER; note = guanosine-3'-phosphate
  modified_base 9: mod_base = OTHER; note = uridine-3'-phosphate
  modified_base 10: mod_base = OTHER; note = cytidine-3'-phosphate
  modified_base 11: mod_base = OTHER; note = uridine-3'-phosphate
  modified_base 12: mod_base = OTHER; note = adenosine-3'-phosphate
  modified_base 13: mod_base = OTHER; note = cytidine-3'-phosphate
  modified_base 14: mod_base = OTHER; note = guanosine-3'-phosphate
  modified_base 15: mod_base = OTHER; note = guanosine-3'-phosphate
  modified_base 16: mod_base = OTHER; note = cytidine-3'-phosphate
  modified_base 17: mod_base = OTHER; note = guanosine-3'-phosphate
  modified_base 18: mod_base = OTHER; note = uridine-3'-phosphate
  modified_base 19: mod_base = OTHER; note = adenosine-3'-phosphate
  misc_feature 1..19: note = RNA
  misc_feature 20..21: note = DNA
acgtgttgtctacggcgtatt

SEQ ID NO: 771 - DNA, 21 bp, synthetic construct
  source 1..21: mol_type = other DNA
  modified_base 1: mod_base = OTHER; note = cytidine-3'-phosphate
  modified_base 2: mod_base = OTHER; note = guanosine-3'-phosphate
  modified_base 3: mod_base = OTHER; note = cytidine-3'-phosphate
  modified_base 4: mod_base = OTHER; note = cytidine-3'-phosphate
  modified_base 5: mod_base = OTHER; note = guanosine-3'-phosphate
  modified_base 6: mod_base = OTHER; note = uridine-3'-phosphate
  modified_base 7: mod_base = OTHER; note = adenosine-3'-phosphate
  modified_base 8: mod_base = OTHER; note = guanosine-3'-phosphate
  modified_base 9: mod_base = OTHER; note = adenosine-3'-phosphate
  modified_base 10: mod_base = OTHER; note = cytidine-3'-phosphate
  modified_base 11: mod_base = OTHER; note = adenosine-3'-phosphate
  modified_base 12: mod_base = OTHER; note = adenosine-3'-phosphate
  modified_base 13: mod_base = OTHER; note = cytidine-3'-phosphate
  modified_base 14: mod_base = OTHER; note = adenosine-3'-phosphate
  modified_base 15: mod_base = OTHER; note = cytidine-3'-phosphate
  modified_base 16: mod_base = OTHER; note = guanosine-3'-phosphate
  modified_base 17: mod_base = OTHER; note = uridine-3'-phosphate
  modified_base 18: mod_base = OTHER; note = guanosine-3'-phosphate
  modified_base 19: mod_base = OTHER; note = uridine-3'-phosphate
  misc_feature 1..19: note = RNA
  misc_feature 20..21: note = DNA
cgccgtagacaacacgtgttt

SEQ ID NO: 772 - DNA, 21 bp, synthetic construct
  source 1..21: mol_type = other DNA
  modified_base 1: mod_base = OTHER; note = adenosine-3'-phosphate
  modified_base 2: mod_base = OTHER; note = cytidine-3'-phosphate
  modified_base 3: mod_base = OTHER; note = adenosine-3'-phosphate
  modified_base 4: mod_base = OTHER; note = cytidine-3'-phosphate
  modified_base 5: mod_base = OTHER; note = guanosine-3'-phosphate
  modified_base 6: mod_base = OTHER; note = uridine-3'-phosphate
  modified_base 7: mod_base = OTHER; note = guanosine-3'-phosphate
  modified_base 8: mod_base = OTHER; note = uridine-3'-phosphate
  modified_base 9: mod_base = OTHER; note = uridine-3'-phosphate
  modified_base 10: mod_base = OTHER; note = guanosine-3'-phosphate
  modified_base 11: mod_base = OTHER; note = uridine-3'-phosphate
  modified_base 12: mod_base = OTHER; note = cytidine-3'-phosphate
  modified_base 13: mod_base = OTHER; note = uridine-3'-phosphate
  modified_base 14: mod_base = OTHER; note = adenosine-3'-phosphate
  modified_base 15: mod_base = OTHER; note = cytidine-3'-phosphate
  modified_base 16: mod_base = OTHER; note = guanosine-3'-phosphate
  modified_base 17: mod_base = OTHER; note = guanosine-3'-phosphate
  modified_base 18: mod_base = OTHER; note = cytidine-3'-phosphate
  modified_base 19: mod_base = OTHER; note = guanosine-3'-phosphate
  misc_feature 1..19: note = RNA
  misc_feature 20..21: note = DNA
acacgtgttgtctacggcgtt

SEQ ID NO: 773 - DNA, 21 bp, synthetic construct
  source 1..21: mol_type = other DNA
  modified_base 1: mod_base = OTHER; note = guanosine-3'-phosphate
  modified_base 2: mod_base = OTHER; note = cytidine-3'-phosphate
  modified_base 3: mod_base = OTHER; note = cytidine-3'-phosphate
  modified_base 4: mod_base = OTHER; note = guanosine-3'-phosphate
  modified_base 5: mod_base = OTHER; note = uridine-3'-phosphate
  modified_base 6: mod_base = OTHER; note = adenosine-3'-phosphate
  modified_base 7: mod_base = OTHER; note = guanosine-3'-phosphate
  modified_base 8: mod_base = OTHER; note = adenosine-3'-phosphate
  modified_base 9: mod_base = OTHER; note = cytidine-3'-phosphate
  modified_base 10: mod_base = OTHER; note = adenosine-3'-phosphate
  modified_base 11: mod_base = OTHER; note = adenosine-3'-phosphate
  modified_base 12: mod_base = OTHER; note = cytidine-3'-phosphate
  modified_base 13: mod_base = OTHER; note = adenosine-3'-phosphate
  modified_base 14: mod_base = OTHER; note = cytidine-3'-phosphate
  modified_base 15: mod_base = OTHER; note = guanosine-3'-phosphate
  modified_base 16: mod_base = OTHER; note = uridine-3'-phosphate
  modified_base 17: mod_base = OTHER; note = guanosine-3'-phosphate
  modified_base 18: mod_base = OTHER; note = uridine-3'-phosphate
  modified_base 19: mod_base = OTHER; note = guanosine-3'-phosphate
  misc_feature 1..19: note = RNA
  misc_feature 20..21: note = DNA
gccgtagacaacacgtgtgtt

SEQ ID NO: 774 - DNA, 21 bp, synthetic construct
  source 1..21: mol_type = other DNA
  modified_base 1: mod_base = OTHER; note = cytidine-3'-phosphate
  modified_base 2: mod_base = OTHER; note = adenosine-3'-phosphate
  modified_base 3: mod_base = OTHER; note = cytidine-3'-phosphate
  modified_base 4: mod_base = OTHER; note = adenosine-3'-phosphate
  modified_base 5: mod_base = OTHER; note = cytidine-3'-phosphate
  modified_base 6: mod_base = OTHER; note = guanosine-3'-phosphate
  modified_base 7: mod_base = OTHER; note = uridine-3'-phosphate
  modified_base 8: mod_base = OTHER; note = guanosine-3'-phosphate
  modified_base 9: mod_base = OTHER; note = uridine-3'-phosphate
  modified_base 10: mod_base = OTHER; note = uridine-3'-phosphate
  modified_base 11: mod_base = OTHER; note = guanosine-3'-phosphate
  modified_base 12: mod_base = OTHER; note = uridine-3'-phosphate
  modified_base 13: mod_base = OTHER; note = cytidine-3'-phosphate
  modified_base 14: mod_base = OTHER; note = uridine-3'-phosphate
  modified_base 15: mod_base = OTHER; note = adenosine-3'-phosphate
  modified_base 16: mod_base = OTHER; note = cytidine-3'-phosphate
  modified_base 17: mod_base = OTHER; note = guanosine-3'-phosphate
  modified_base 18: mod_base = OTHER; note = guanosine-3'-phosphate
  modified_base 19: mod_base = OTHER; note = cytidine-3'-phosphate
  misc_feature 1..19: note = RNA
  misc_feature 20..21: note = DNA
cacacgtgttgtctacggctt

SEQ ID NO: 775 - DNA, 21 bp, synthetic construct
  source 1..21: mol_type = other DNA
  modified_base 1: mod_base = OTHER; note = cytidine-3'-phosphate
  modified_base 2: mod_base = OTHER; note = cytidine-3'-phosphate
  modified_base 3: mod_base = OTHER; note = guanosine-3'-phosphate
  modified_base 4: mod_base = OTHER; note = uridine-3'-phosphate
  modified_base 5: mod_base = OTHER; note = adenosine-3'-phosphate
  modified_base 6: mod_base = OTHER; note = guanosine-3'-phosphate
  modified_base 7: mod_base = OTHER; note = adenosine-3'-phosphate
  modified_base 8: mod_base = OTHER; note = cytidine-3'-phosphate
  modified_base 9: mod_base = OTHER; note = adenosine-3'-phosphate
  modified_base 10: mod_base = OTHER; note = adenosine-3'-phosphate
  modified_base 11: mod_base = OTHER; note = cytidine-3'-phosphate
  modified_base 12: mod_base = OTHER; note = adenosine-3'-phosphate
  modified_base 13: mod_base = OTHER; note = cytidine-3'-phosphate
  modified_base 14: mod_base = OTHER; note = guanosine-3'-phosphate
  modified_base 15: mod_base = OTHER; note = uridine-3'-phosphate
  modified_base 16: mod_base = OTHER; note = guanosine-3'-phosphate
  modified_base 17: mod_base = OTHER; note = uridine-3'-phosphate
  modified_base 18: mod_base = OTHER; note = guanosine-3'-phosphate
  modified_base 19: mod_base = OTHER; note = uridine-3'-phosphate
  misc_feature 1..19: note = RNA
  misc_feature 20..21: note = DNA
ccgtagacaacacgtgtgttt

SEQ ID NO: 776 - DNA, 21 bp, synthetic construct
  source 1..21: mol_type = other DNA
  modified_base 1: mod_base = OTHER; note = adenosine-3'-phosphate
  modified_base 2: mod_base = OTHER; note = cytidine-3'-phosphate
  modified_base 3: mod_base = OTHER; note = adenosine-3'-phosphate
  modified_base 4: mod_base = OTHER; note = cytidine-3'-phosphate
  modified_base 5: mod_base = OTHER; note = adenosine-3'-phosphate
  modified_base 6: mod_base = OTHER; note = cytidine-3'-phosphate
  modified_base 7: mod_base = OTHER; note = guanosine-3'-phosphate
  modified_base 8: mod_base = OTHER; note = uridine-3'-phosphate
  modified_base 9: mod_base = OTHER; note = guanosine-3'-phosphate
  modified_base 10: mod_base = OTHER; note = uridine-3'-phosphate
  modified_base 11: mod_base = OTHER; note = uridine-3'-phosphate
  modified_base 12: mod_base = OTHER; note = guanosine-3'-phosphate
  modified_base 13: mod_base = OTHER; note = uridine-3'-phosphate
  modified_base 14: mod_base = OTHER; note = cytidine-3'-phosphate
  modified_base 15: mod_base = OTHER; note = uridine-3'-phosphate
  modified_base 16: mod_base = OTHER; note = adenosine-3'-phosphate
  modified_base 17: mod_base = OTHER; note = cytidine-3'-phosphate
  modified_base 18: mod_base = OTHER; note = guanosine-3'-phosphate
  modified_base 19: mod_base = OTHER; note = guanosine-3'-phosphate
  misc_feature 1..19: note = RNA
  misc_feature 20..21: note = DNA
acacacgtgttgtctacggtt

SEQ ID NO: 777 - DNA, 21 bp, synthetic construct
  source 1..21: mol_type = other DNA
  modified_base 1: mod_base = OTHER; note = cytidine-3'-phosphate
  modified_base 2: mod_base = OTHER; note = guanosine-3'-phosphate
  modified_base 3: mod_base = OTHER; note = uridine-3'-phosphate
  modified_base 4: mod_base = OTHER; note = adenosine-3'-phosphate
  modified_base 5: mod_base = OTHER; note = guanosine-3'-phosphate
  modified_base 6: mod_base = OTHER; note = adenosine-3'-phosphate
  modified_base 7: mod_base = OTHER; note = cytidine-3'-phosphate
  modified_base 8: mod_base = OTHER; note = adenosine-3'-phosphate
  modified_base 9: mod_base = OTHER; note = adenosine-3'-phosphate
  modified_base 10: mod_base = OTHER; note = cytidine-3'-phosphate
  modified_base 11: mod_base = OTHER; note = adenosine-3'-phosphate
  modified_base 12: mod_base = OTHER; note = cytidine-3'-phosphate
  modified_base 13: mod_base = OTHER; note = guanosine-3'-phosphate
  modified_base 14: mod_base = OTHER; note = uridine-3'-phosphate
  modified_base 15: mod_base = OTHER; note = guanosine-3'-phosphate
  modified_base 16: mod_base = OTHER; note = uridine-3'-phosphate
  modified_base 17: mod_base = OTHER; note = guanosine-3'-phosphate
  modified_base 18: mod_base = OTHER; note = uridine-3'-phosphate
  modified_base 19: mod_base = OTHER; note = adenosine-3'-phosphate
  misc_feature 1..19: note = RNA
  misc_feature 20..21: note = DNA
cgtagacaacacgtgtgtatt

SEQ ID NO: 778 - DNA, 21 bp, synthetic construct
  source 1..21: mol_type = other DNA
  modified_base 1: mod_base = OTHER; note = uridine-3'-phosphate
  modified_base 2: mod_base = OTHER; note = adenosine-3'-phosphate
  modified_base 3: mod_base = OTHER; note = cytidine-3'-phosphate
  modified_base 4: mod_base = OTHER; note = adenosine-3'-phosphate
  modified_base 5: mod_base = OTHER; note = cytidine-3'-phosphate
  modified_base 6: mod_base = OTHER; note = adenosine-3'-phosphate
  modified_base 7: mod_base = OTHER; note = cytidine-3'-phosphate
  modified_base 8: mod_base = OTHER; note = guanosine-3'-phosphate
  modified_base 9: mod_base = OTHER; note = uridine-3'-phosphate
  modified_base 10: mod_base = OTHER; note = guanosine-3'-phosphate
  modified_base 11: mod_base = OTHER; note = uridine-3'-phosphate
  modified_base 12: mod_base = OTHER; note = uridine-3'-phosphate
  modified_base 13: mod_base = OTHER; note = guanosine-3'-phosphate
  modified_base 14: mod_base = OTHER; note = uridine-3'-phosphate
  modified_base 15: mod_base = OTHER; note = cytidine-3'-phosphate
  modified_base 16: mod_base = OTHER; note = uridine-3'-phosphate
  modified_base 17: mod_base = OTHER; note = adenosine-3'-phosphate
  modified_base 18: mod_base = OTHER; note = cytidine-3'-phosphate
  modified_base 19: mod_base = OTHER; note = guanosine-3'-phosphate
  misc_feature 1..19: note = RNA
  misc_feature 20..21: note = DNA
tacacacgtgttgtctacgtt

SEQ ID NO: 779 - DNA, 21 bp, synthetic construct
  source 1..21: mol_type = other DNA
  modified_base 1: mod_base = OTHER; note = uridine-3'-phosphate
  modified_base 2: mod_base = OTHER; note = adenosine-3'-phosphate
  modified_base 3: mod_base = OTHER; note = guanosine-3'-phosphate
  modified_base 4: mod_base = OTHER; note = adenosine-3'-phosphate
  modified_base 5: mod_base = OTHER; note = cytidine-3'-phosphate
  modified_base 6: mod_base = OTHER; note = adenosine-3'-phosphate
  modified_base 7: mod_base = OTHER; note = adenosine-3'-phosphate
  modified_base 8: mod_base = OTHER; note = cytidine-3'-phosphate
  modified_base 9: mod_base = OTHER; note = adenosine-3'-phosphate
  modified_base 10: mod_base = OTHER; note = cytidine-3'-phosphate
  modified_base 11: mod_base = OTHER; note = guanosine-3'-phosphate
  modified_base 12: mod_base = OTHER; note = uridine-3'-phosphate
  modified_base 13: mod_base = OTHER; note = guanosine-3'-phosphate
  modified_base 14: mod_base = OTHER; note = uridine-3'-phosphate
  modified_base 15: mod_base = OTHER; note = guanosine-3'-phosphate
  modified_base 16: mod_base = OTHER; note = uridine-3'-phosphate
  modified_base 17: mod_base = OTHER; note = adenosine-3'-phosphate
  modified_base 18: mod_base = OTHER; note = guanosine-3'-phosphate
  modified_base 19: mod_base = OTHER; note = uridine-3'-phosphate
  misc_feature 1..19: note = RNA
  misc_feature 20..21: note = DNA
tagacaacacgtgtgtagttt

SEQ ID NO: 780 - DNA, 21 bp, synthetic construct
  source 1..21: mol_type = other DNA
  modified_base 1: mod_base = OTHER; note = adenosine-3'-phosphate
  modified_base 2: mod_base = OTHER; note = cytidine-3'-phosphate
  modified_base 3: mod_base = OTHER; note = uridine-3'-phosphate
  modified_base 4: mod_base = OTHER; note = adenosine-3'-phosphate
  modified_base 5: mod_base = OTHER; note = cytidine-3'-phosphate
  modified_base 6: mod_base = OTHER; note = adenosine-3'-phosphate
  modified_base 7: mod_base = OTHER; note = cytidine-3'-phosphate
  modified_base 8: mod_base = OTHER; note = adenosine-3'-phosphate
  modified_base 9: mod_base = OTHER; note = cytidine-3'-phosphate
  modified_base 10: mod_base = OTHER; note = guanosine-3'-phosphate
  modified_base 11: mod_base = OTHER; note = uridine-3'-phosphate
  modified_base 12: mod_base = OTHER; note = guanosine-3'-phosphate
  modified_base 13: mod_base = OTHER; note = uridine-3'-phosphate
  modified_base 14: mod_base = OTHER; note = uridine-3'-phosphate
  modified_base 15: mod_base = OTHER; note = guanosine-3'-phosphate
  modified_base 16: mod_base = OTHER; note = uridine-3'-phosphate
  modified_base 17: mod_base = OTHER; note = cytidine-3'-phosphate
  modified_base 18: mod_base = OTHER; note = uridine-3'-phosphate
  modified_base 19: mod_base = OTHER; note = adenosine-3'-phosphate
  misc_feature 1..19: note = RNA
  misc_feature 20..21: note = DNA
actacacacgtgttgtctatt

SEQ ID NO: 781 - DNA, 21 bp, synthetic construct
  source 1..21: mol_type = other DNA
  modified_base 1: mod_base = OTHER; note = adenosine-3'-phosphate
  modified_base 2: mod_base = OTHER; note = guanosine-3'-phosphate
  modified_base 3: mod_base = OTHER; note = adenosine-3'-phosphate
  modified_base 4: mod_base = OTHER; note = cytidine-3'-phosphate
  modified_base 5: mod_base = OTHER; note = adenosine-3'-phosphate
  modified_base 6: mod_base = OTHER; note = adenosine-3'-phosphate
  modified_base 7: mod_base = OTHER; note = cytidine-3'-phosphate
  modified_base 8: mod_base = OTHER; note = adenosine-3'-phosphate
  modified_base 9: mod_base = OTHER; note = cytidine-3'-phosphate
  modified_base 10: mod_base = OTHER; note = guanosine-3'-phosphate
  modified_base 11: mod_base = OTHER; note = uridine-3'-phosphate
  modified_base 12: mod_base = OTHER; note = guanosine-3'-phosphate
  modified_base 13: mod_base = OTHER; note = uridine-3'-phosphate
  modified_base 14: mod_base = OTHER; note = guanosine-3'-phosphate
  modified_base 15: mod_base = OTHER; note = uridine-3'-phosphate
  modified_base 16: mod_base = OTHER; note = adenosine-3'-phosphate
  modified_base 17: mod_base = OTHER; note = guanosine-3'-phosphate
  modified_base 18: mod_base = OTHER; note = uridine-3'-phosphate
  modified_base 19: mod_base = OTHER; note = cytidine-3'-phosphate
  misc_feature 1..19: note = RNA
  misc_feature 20..21: note = DNA
agacaacacgtgtgtagtctt

SEQ ID NO: 782 - DNA, 21 bp, synthetic construct
  source 1..21: mol_type = other DNA
  modified_base 1: mod_base = OTHER; note = guanosine-3'-phosphate
  modified_base 2: mod_base = OTHER; note = adenosine-3'-phosphate
  modified_base 3: mod_base = OTHER; note = cytidine-3'-phosphate
  modified_base 4: mod_base = OTHER; note = uridine-3'-phosphate
  modified_base 5: mod_base = OTHER; note = adenosine-3'-phosphate
  modified_base 6: mod_base = OTHER; note = cytidine-3'-phosphate
  modified_base 7: mod_base = OTHER; note = adenosine-3'-phosphate
  modified_base 8: mod_base = OTHER; note = cytidine-3'-phosphate
  modified_base 9: mod_base = OTHER; note = adenosine-3'-phosphate
  modified_base 10: mod_base = OTHER; note = cytidine-3'-phosphate
  modified_base 11: mod_base = OTHER; note = guanosine-3'-phosphate
  modified_base 12: mod_base = OTHER; note = uridine-3'-phosphate
  modified_base 13: mod_base = OTHER; note = guanosine-3'-phosphate
  modified_base 14: mod_base = OTHER; note = uridine-3'-phosphate
  modified_base 15: mod_base = OTHER; note = uridine-3'-phosphate
  modified_base 16: mod_base = OTHER; note = guanosine-3'-phosphate
  modified_base 17: mod_base = OTHER; note = uridine-3'-phosphate
  modified_base 18: mod_base = OTHER; note = cytidine-3'-phosphate
  modified_base 19: mod_base = OTHER; note = uridine-3'-phosphate
  misc_feature 1..19: note = RNA
  misc_feature 20..21: note = DNA
gactacacacgtgttgtcttt

SEQ ID NO: 783 - DNA, 21 bp, synthetic construct
  source 1..21: mol_type = other DNA
  modified_base 1: mod_base = OTHER; note = guanosine-3'-phosphate
  modified_base 2: mod_base = OTHER; note = adenosine-3'-phosphate
  modified_base 3: mod_base = OTHER; note = cytidine-3'-phosphate
  modified_base 4: mod_base = OTHER; note = adenosine-3'-phosphate
  modified_base 5: mod_base = OTHER; note = adenosine-3'-phosphate
  modified_base 6: mod_base = OTHER; note = cytidine-3'-phosphate
  modified_base 7: mod_base = OTHER; note = adenosine-3'-phosphate
  modified_base 8: mod_base = OTHER; note = cytidine-3'-phosphate
  modified_base 9: mod_base = OTHER; note = guanosine-3'-phosphate
  modified_base 10: mod_base = OTHER; note = uridine-3'-phosphate
  modified_base 11: mod_base = OTHER; note = guanosine-3'-phosphate
  modified_base 12: mod_base = OTHER; note = uridine-3'-phosphate
  modified_base 13: mod_base = OTHER; note = guanosine-3'-phosphate
  modified_base 14: mod_base = OTHER; note = uridine-3'-phosphate
  modified_base 15: mod_base = OTHER; note = adenosine-3'-phosphate
  modified_base 16: mod_base = OTHER; note = guanosine-3'-phosphate
  modified_base 17: mod_base = OTHER; note = uridine-3'-phosphate
  modified_base 18: mod_base = OTHER; note = cytidine-3'-phosphate
  modified_base 19: mod_base = OTHER; note = adenosine-3'-phosphate
  misc_feature 1..19: note = RNA
  misc_feature 20..21: note = DNA
gacaacacgtgtgtagtcatt

SEQ ID NO: 784 - DNA, 21 bp, synthetic construct
  source 1..21: mol_type = other DNA
  modified_base 1: mod_base = OTHER; note = uridine-3'-phosphate
  modified_base 2: mod_base = OTHER; note = guanosine-3'-phosphate
  modified_base 3: mod_base = OTHER; note = adenosine-3'-phosphate
  modified_base 4: mod_base = OTHER; note = cytidine-3'-phosphate
  modified_base 5: mod_base = OTHER; note = uridine-3'-phosphate
  modified_base 6: mod_base = OTHER; note = adenosine-3'-phosphate
  modified_base 7: mod_base = OTHER; note = cytidine-3'-phosphate
  modified_base 8: mod_base = OTHER; note = adenosine-3'-phosphate
  modified_base 9: mod_base = OTHER; note = cytidine-3'-phosphate
  modified_base 10: mod_base = OTHER; note = adenosine-3'-phosphate
  modified_base 11: mod_base = OTHER; note = cytidine-3'-phosphate
  modified_base 12: mod_base = OTHER; note = guanosine-3'-phosphate
  modified_base 13: mod_base = OTHER; note = uridine-3'-phosphate
  modified_base 14: mod_base = OTHER; note = guanosine-3'-phosphate
  modified_base 15: mod_base = OTHER; note = uridine-3'-phosphate
  modified_base 16: mod_base = OTHER; note = uridine-3'-phosphate
  modified_base 17: mod_base = OTHER; note = guanosine-3'-phosphate
  modified_base 18: mod_base = OTHER; note = uridine-3'-phosphate
  modified_base 19: mod_base = OTHER; note = cytidine-3'-phosphate
  misc_feature 1..19: note = RNA
  misc_feature 20..21: note = DNA
tgactacacacgtgttgtctt

SEQ ID NO: 785 - DNA, 21 bp, synthetic construct
  source 1..21: mol_type = other DNA
  modified_base 1: mod_base = OTHER; note = adenosine-3'-phosphate
  modified_base 2: mod_base = OTHER; note = cytidine-3'-phosphate
  modified_base 3: mod_base = OTHER; note = adenosine-3'-phosphate
  modified_base 4: mod_base = OTHER; note = adenosine-3'-phosphate
  modified_base 5: mod_base = OTHER; note = cytidine-3'-phosphate
  modified_base 6: mod_base = OTHER; note = adenosine-3'-phosphate
  modified_base 7: mod_base = OTHER; note = cytidine-3'-phosphate
  modified_base 8: mod_base = OTHER; note = guanosine-3'-phosphate
  modified_base 9: mod_base = OTHER; note = uridine-3'-phosphate
  modified_base 10: mod_base = OTHER; note = guanosine-3'-phosphate
  modified_base 11: mod_base = OTHER; note = uridine-3'-phosphate
  modified_base 12: mod_base = OTHER; note = guanosine-3'-phosphate
  modified_base 13: mod_base = OTHER; note = uridine-3'-phosphate
  modified_base 14: mod_base = OTHER; note = adenosine-3'-phosphate
  modified_base 15: mod_base = OTHER; note = guanosine-3'-phosphate
  modified_base 16: mod_base = OTHER; note = uridine-3'-phosphate
  modified_base 17: mod_base = OTHER; note = cytidine-3'-phosphate
  modified_base 18: mod_base = OTHER; note = adenosine-3'-phosphate
  modified_base 19: mod_base = OTHER; note = guanosine-3'-phosphate
  misc_feature 1..19: note = RNA
  misc_feature 20..21: note = DNA
acaacacgtgtgtagtcagtt

SEQ ID NO: 786 - DNA, 21 bp, synthetic construct
  source 1..21: mol_type = other DNA
  modified_base 1: mod_base = OTHER; note = cytidine-3'-phosphate
  modified_base 2: mod_base = OTHER; note = uridine-3'-phosphate
  modified_base 3: mod_base = OTHER; note = guanosine-3'-phosphate
  modified_base 4: mod_base = OTHER; note = adenosine-3'-phosphate
  modified_base 5: mod_base = OTHER; note = cytidine-3'-phosphate
  modified_base 6: mod_base = OTHER; note = uridine-3'-phosphate
  modified_base 7: mod_base = OTHER; note = adenosine-3'-phosphate
  modified_base 8: mod_base = OTHER; note = cytidine-3'-phosphate
  modified_base 9: mod_base = OTHER; note = adenosine-3'-phosphate
  modified_base 10: mod_base = OTHER; note = cytidine-3'-phosphate
  modified_base 11: mod_base = OTHER; note = adenosine-3'-phosphate
  modified_base 12: mod_base = OTHER; note = cytidine-3'-phosphate
  modified_base 13: mod_base = OTHER; note = guanosine-3'-phosphate
  modified_base 14: mod_base = OTHER; note = uridine-3'-phosphate
  modified_base 15: mod_base = OTHER; note = guanosine-3'-phosphate
  modified_base 16: mod_base = OTHER; note = uridine-3'-phosphate
  modified_base 17: mod_base = OTHER; note = uridine-3'-phosphate
  modified_base 18: mod_base = OTHER; note = guanosine-3'-phosphate
  modified_base 19: mod_base = OTHER; note = uridine-3'-phosphate
  misc_feature 1..19: note = RNA
  misc_feature 20..21: note = DNA
ctgactacacacgtgttgttt

SEQ ID NO: 787 - DNA, 21 bp, synthetic construct
  source 1..21: mol_type = other DNA
  modified_base 1: mod_base = OTHER; note = cytidine-3'-phosphate
  modified_base 2: mod_base = OTHER; note = adenosine-3'-phosphate
  modified_base 3: mod_base = OTHER; note = adenosine-3'-phosphate
  modified_base 4: mod_base = OTHER; note = cytidine-3'-phosphate
  modified_base 5: mod_base = OTHER; note = adenosine-3'-phosphate
  modified_base 6: mod_base = OTHER; note = cytidine-3'-phosphate
  modified_base 7: mod_base = OTHER; note = guanosine-3'-phosphate
  modified_base 8: mod_base = OTHER; note = uridine-3'-phosphate
  modified_base 9: mod_base = OTHER; note = guanosine-3'-phosphate
  modified_base 10: mod_base = OTHER; note = uridine-3'-phosphate
  modified_base 11: mod_base = OTHER; note = guanosine-3'-phosphate
  modified_base 12: mod_base = OTHER; note = uridine-3'-phosphate
  modified_base 13: mod_base = OTHER; note = adenosine-3'-phosphate
  modified_base 14: mod_base = OTHER; note = guanosine-3'-phosphate
  modified_base 15: mod_base = OTHER; note = uridine-3'-phosphate
  modified_base 16: mod_base = OTHER; note = cytidine-3'-phosphate
  modified_base 17: mod_base = OTHER; note = adenosine-3'-phosphate
  modified_base 18: mod_base = OTHER; note = guanosine-3'-phosphate
  modified_base 19: mod_base = OTHER; note = guanosine-3'-phosphate
  misc_feature 1..19: note = RNA
  misc_feature 20..21: note = DNA
caacacgtgtgtagtcaggtt

SEQ ID NO: 788 - DNA, 21 bp, synthetic construct
  source 1..21: mol_type = other DNA
  modified_base 1: mod_base = OTHER; note = cytidine-3'-phosphate
  modified_base 2: mod_base = OTHER; note = cytidine-3'-phosphate
  modified_base 3: mod_base = OTHER; note = uridine-3'-phosphate
  modified_base 4: mod_base = OTHER; note = guanosine-3'-phosphate
  modified_base 5: mod_base = OTHER; note = adenosine-3'-phosphate
  modified_base 6: mod_base = OTHER; note = cytidine-3'-phosphate
  modified_base 7: mod_base = OTHER; note = uridine-3'-phosphate
  modified_base 8: mod_base = OTHER; note = adenosine-3'-phosphate
  modified_base 9: mod_base = OTHER; note = cytidine-3'-phosphate
  modified_base 10: mod_base = OTHER; note = adenosine-3'-phosphate
  modified_base 11: mod_base = OTHER; note = cytidine-3'-phosphate
  modified_base 12: mod_base = OTHER; note = adenosine-3'-phosphate
  modified_base 13: mod_base = OTHER; note = cytidine-3'-phosphate
  modified_base 14: mod_base = OTHER; note = guanosine-3'-phosphate
  modified_base 15: mod_base = OTHER; note = uridine-3'-phosphate
  modified_base 16: mod_base = OTHER; note = guanosine-3'-phosphate
  modified_base 17: mod_base = OTHER; note = uridine-3'-phosphate
  modified_base 18: mod_base = OTHER; note = uridine-3'-phosphate
  modified_base 19: mod_base = OTHER; note = guanosine-3'-phosphate
  misc_feature 1..19: note = RNA
  misc_feature 20..21: note = DNA
cctgactacacacgtgttgtt

SEQ ID NO: 789 - DNA, 21 bp, synthetic construct
  source 1..21: mol_type = other DNA
  modified_base 1: mod_base = OTHER; note = cytidine-3'-phosphate
  modified_base 2: mod_base = OTHER; note = adenosine-3'-phosphate
  modified_base 3: mod_base = OTHER; note = cytidine-3'-phosphate
  modified_base 4: mod_base = OTHER; note = guanosine-3'-phosphate
  modified_base 5: mod_base = OTHER; note = uridine-3'-phosphate
  modified_base 6: mod_base = OTHER; note = guanosine-3'-phosphate
  modified_base 7: mod_base = OTHER; note = uridine-3'-phosphate
  modified_base 8: mod_base = OTHER; note = guanosine-3'-phosphate
  modified_base 9: mod_base = OTHER; note = uridine-3'-phosphate
  modified_base 10: mod_base = OTHER; note = adenosine-3'-phosphate
  modified_base 11: mod_base = OTHER; note = guanosine-3'-phosphate
  modified_base 12: mod_base = OTHER; note = uridine-3'-phosphate
  modified_base 13: mod_base = OTHER; note = cytidine-3'-phosphate
  modified_base 14: mod_base = OTHER; note = adenosine-3'-phosphate
  modified_base 15: mod_base = OTHER; note = guanosine-3'-phosphate
  modified_base 16: mod_base = OTHER; note = guanosine-3'-phosphate
  modified_base 17: mod_base = OTHER; note = adenosine-3'-phosphate
  modified_base 18: mod_base = OTHER; note = guanosine-3'-phosphate
  modified_base 19: mod_base = OTHER; note = cytidine-3'-phosphate
  misc_feature 1..19: note = RNA
  misc_feature 20..21: note = DNA
cacgtgtgtagtcaggagctt

SEQ ID NO: 790 - DNA, 21 bp, synthetic construct
  source 1..21: mol_type = other DNA
  modified_base 1: mod_base = OTHER; note = guanosine-3'-phosphate
  modified_base 2: mod_base = OTHER; note = cytidine-3'-phosphate
  modified_base 3: mod_base = OTHER; note = uridine-3'-phosphate
  modified_base 4: mod_base = OTHER; note = cytidine-3'-phosphate
  modified_base 5: mod_base = OTHER; note = cytidine-3'-phosphate
  modified_base 6: mod_base = OTHER; note = uridine-3'-phosphate
  modified_base 7: mod_base = OTHER; note = guanosine-3'-phosphate
  modified_base 8: mod_base = OTHER; note = adenosine-3'-phosphate
  modified_base 9: mod_base = OTHER; note = cytidine-3'-phosphate
  modified_base 10: mod_base = OTHER; note = uridine-3'-phosphate
  modified_base 11: mod_base = OTHER; note = adenosine-3'-phosphate
  modified_base 12: mod_base = OTHER; note = cytidine-3'-phosphate
  modified_base 13: mod_base = OTHER; note = adenosine-3'-phosphate
  modified_base 14: mod_base = OTHER; note = cytidine-3'-phosphate
  modified_base 15: mod_base = OTHER; note = adenosine-3'-phosphate
  modified_base 16: mod_base = OTHER; note = cytidine-3'-phosphate
  modified_base 17: mod_base = OTHER; note = guanosine-3'-phosphate
  modified_base 18: mod_base = OTHER; note = uridine-3'-phosphate
  modified_base 19: mod_base = OTHER; note = guanosine-3'-phosphate
  misc_feature 1..19: note = RNA
  misc_feature 20..21: note = DNA
gctcctgactacacacgtgtt

SEQ ID NO: 791 - DNA, 21 bp, synthetic construct
  source 1..21: mol_type = other DNA
  modified_base 1: mod_base = OTHER; note = adenosine-3'-phosphate
  modified_base 2: mod_base = OTHER; note = cytidine-3'-phosphate
  modified_base 3: mod_base = OTHER; note = guanosine-3'-phosphate
  modified_base 4: mod_base = OTHER; note = uridine-3'-phosphate
  modified_base 5: mod_base = OTHER; note = guanosine-3'-phosphate
  modified_base 6: mod_base = OTHER; note = uridine-3'-phosphate
  modified_base 7: mod_base = OTHER; note = guanosine-3'-phosphate
  modified_base 8: mod_base = OTHER; note = uridine-3'-phosphate
  modified_base 9: mod_base = OTHER; note = adenosine-3'-phosphate
  modified_base 10: mod_base = OTHER; note = guanosine-3'-phosphate
  modified_base 11: mod_base = OTHER; note = uridine-3'-phosphate
  modified_base 12: mod_base = OTHER; note = cytidine-3'-phosphate
  modified_base 13: mod_base = OTHER; note = adenosine-3'-phosphate
  modified_base 14: mod_base = OTHER; note = guanosine-3'-phosphate
  modified_base 15: mod_base = OTHER; note = guanosine-3'-phosphate
  modified_base 16: mod_base = OTHER; note = adenosine-3'-phosphate
  modified_base 17: mod_base = OTHER; note = guanosine-3'-phosphate
  modified_base 18: mod_base = OTHER; note = cytidine-3'-phosphate
  modified_base 19: mod_base = OTHER; note = cytidine-3'-phosphate
  misc_feature 1..19: note = RNA
  misc_feature 20..21: note = DNA
acgtgtgtagtcaggagcctt

SEQ ID NO: 792 - DNA, 21 bp, synthetic construct
  source 1..21: mol_type = other DNA
  modified_base 1: mod_base = OTHER; note = guanosine-3'-phosphate
  modified_base 2: mod_base = OTHER; note = guanosine-3'-phosphate
  modified_base 3: mod_base = OTHER; note = cytidine-3'-phosphate
  modified_base 4: mod_base = OTHER; note = uridine-3'-phosphate
  modified_base 5: mod_base = OTHER; note = cytidine-3'-phosphate
  modified_base 6: mod_base = OTHER; note = cytidine-3'-phosphate
  modified_base 7: mod_base = OTHER; note = uridine-3'-phosphate
  modified_base 8: mod_base = OTHER; note = guanosine-3'-phosphate
  modified_base 9: mod_base = OTHER; note = adenosine-3'-phosphate
  modified_base 10: mod_base = OTHER; note = cytidine-3'-phosphate
  modified_base 11: mod_base = OTHER; note = uridine-3'-phosphate
  modified_base 12: mod_base = OTHER; note = adenosine-3'-phosphate
  modified_base 13: mod_base = OTHER; note = cytidine-3'-phosphate
  modified_base 14: mod_base = OTHER; note = adenosine-3'-phosphate
  modified_base 15: mod_base = OTHER; note = cytidine-3'-phosphate
  modified_base 16: mod_base = OTHER; note = adenosine-3'-phosphate
  modified_base 17: mod_base = OTHER; note = cytidine-3'-phosphate
  modified_base 18: mod_base = OTHER; note = guanosine-3'-phosphate
  modified_base 19: mod_base = OTHER; note = uridine-3'-phosphate
  misc_feature 1..19: note = RNA
  misc_feature 20..21: note = DNA
ggctcctgactacacacgttt

SEQ ID NO: 793 - DNA, 21 bp, synthetic construct
  source 1..21: mol_type = other DNA
  modified_base 1: mod_base = OTHER; note = cytidine-3'-phosphate
  modified_base 2: mod_base = OTHER; note = guanosine-3'-phosphate
  modified_base 3: mod_base = OTHER; note = uridine-3'-phosphate
  modified_base 4: mod_base = OTHER; note = guanosine-3'-phosphate
  modified_base 5: mod_base = OTHER; note = uridine-3'-phosphate
  modified_base 6: mod_base = OTHER; note = guanosine-3'-phosphate
  modified_base 7: mod_base = OTHER; note = uridine-3'-phosphate
  modified_base 8: mod_base = OTHER; note = adenosine-3'-phosphate
  modified_base 9: mod_base = OTHER; note = guanosine-3'-phosphate
  modified_base 10: mod_base = OTHER; note = uridine-3'-phosphate
  modified_base 11: mod_base = OTHER; note = cytidine-3'-phosphate
  modified_base 12: mod_base = OTHER; note = adenosine-3'-phosphate
  modified_base 13: mod_base = OTHER; note = guanosine-3'-phosphate
  modified_base 14: mod_base = OTHER; note = guanosine-3'-phosphate
  modified_base 15: mod_base = OTHER; note = adenosine-3'-phosphate
  modified_base 16: mod_base = OTHER; note = guanosine-3'-phosphate
  modified_base 17: mod_base = OTHER; note = cytidine-3'-phosphate
  modified_base 18: mod_base = OTHER; note = cytidine-3'-phosphate
  modified_base 19: mod_base = OTHER; note = guanosine-3'-phosphate
  misc_feature 1..19: note = RNA
  misc_feature 20..21: note = DNA
cgtgtgtagtcaggagccgtt

SEQ ID NO: 794 - DNA, 21 bp, synthetic construct
  source 1..21: mol_type = other DNA
  modified_base 1: mod_base = OTHER; note = cytidine-3'-phosphate
  modified_base 2: mod_base = OTHER; note = guanosine-3'-phosphate
  modified_base 3: mod_base = OTHER; note = guanosine-3'-phosphate
  modified_base 4: mod_base = OTHER; note = cytidine-3'-phosphate
  modified_base 5: mod_base = OTHER; note = uridine-3'-phosphate
  modified_base 6: mod_base = OTHER; note = cytidine-3'-phosphate
  modified_base 7: mod_base = OTHER; note = cytidine-3'-phosphate
  modified_base 8: mod_base = OTHER; note = uridine-3'-phosphate
  modified_base 9: mod_base = OTHER; note = guanosine-3'-phosphate
  modified_base 10: mod_base = OTHER; note = adenosine-3'-phosphate
  modified_base 11: mod_base = OTHER; note = cytidine-3'-phosphate
  modified_base 12: mod_base = OTHER; note = uridine-3'-phosphate
  modified_base 13: mod_base = OTHER; note = adenosine-3'-phosphate
  modified_base 14: mod_base = OTHER; note = cytidine-3'-phosphate
  modified_base 15: mod_base = OTHER; note = adenosine-3'-phosphate
  modified_base 16: mod_base = OTHER; note = cytidine-3'-phosphate
  modified_base 17: mod_base = OTHER; note = adenosine-3'-phosphate
  modified_base 18: mod_base = OTHER; note = cytidine-3'-phosphate
  modified_base 19: mod_base = OTHER; note = guanosine-3'-phosphate
  misc_feature 1..19: note = RNA
  misc_feature 20..21: note = DNA
cggctcctgactacacacgtt

SEQ ID NO: 795 - DNA, 21 bp, synthetic construct
  source 1..21: mol_type = other DNA
  modified_base 1: mod_base = OTHER; note = uridine-3'-phosphate
  modified_base 2: mod_base = OTHER; note = guanosine-3'-phosphate
  modified_base 3: mod_base = OTHER; note = uridine-3'-phosphate
  modified_base 4: mod_base = OTHER; note = guanosine-3'-phosphate
  modified_base 5: mod_base = OTHER; note = uridine-3'-phosphate
  modified_base 6: mod_base = OTHER; note = adenosine-3'-phosphate
  modified_base 7: mod_base = OTHER; note = guanosine-3'-phosphate
  modified_base 8: mod_base = OTHER; note = uridine-3'-phosphate
  modified_base 9: mod_base = OTHER; note = cytidine-3'-phosphate
  modified_base 10: mod_base = OTHER; note = adenosine-3'-phosphate
  modified_base 11: mod_base = OTHER; note = guanosine-3'-phosphate
  modified_base 12: mod_base = OTHER; note = guanosine-3'-phosphate
  modified_base 13: mod_base = OTHER; note = adenosine-3'-phosphate
  modified_base 14: mod_base = OTHER; note = guanosine-3'-phosphate
  modified_base 15: mod_base = OTHER; note = cytidine-3'-phosphate
  modified_base 16: mod_base = OTHER; note = cytidine-3'-phosphate
  modified_base 17: mod_base = OTHER; note = guanosine-3'-phosphate
  modified_base 18: mod_base = OTHER; note = guanosine-3'-phosphate
  modified_base 19: mod_base = OTHER; note = guanosine-3'-phosphate
  misc_feature 1..19: note = RNA
  misc_feature 20..21: note = DNA
tgtgtagtcaggagccgggtt

SEQ ID NO: 796 - DNA, 21 bp, synthetic construct
  source 1..21: mol_type = other DNA
  modified_base 1: mod_base = OTHER; note = cytidine-3'-phosphate
  modified_base 2: mod_base = OTHER; note = cytidine-3'-phosphate
  modified_base 3: mod_base = OTHER; note = cytidine-3'-phosphate
  modified_base 4: mod_base = OTHER; note = guanosine-3'-phosphate
  modified_base 5: mod_base = OTHER; note = guanosine-3'-phosphate
  modified_base 6: mod_base = OTHER; note = cytidine-3'-phosphate
  modified_base 7: mod_base = OTHER; note = uridine-3'-phosphate
  modified_base 8: mod_base = OTHER; note = cytidine-3'-phosphate
  modified_base 9: mod_base = OTHER; note = cytidine-3'-phosphate
  modified_base 10: mod_base = OTHER; note = uridine-3'-phosphate
  modified_base 11: mod_base = OTHER; note = guanosine-3'-phosphate
  modified_base 12: mod_base = OTHER; note = adenosine-3'-phosphate
  modified_base 13: mod_base = OTHER; note = cytidine-3'-phosphate
  modified_base 14: mod_base = OTHER; note = uridine-3'-phosphate
  modified_base 15: mod_base = OTHER; note = adenosine-3'-phosphate
  modified_base 16: mod_base = OTHER; note = cytidine-3'-phosphate
  modified_base 17: mod_base = OTHER; note = adenosine-3'-phosphate
  modified_base 18: mod_base = OTHER; note = cytidine-3'-phosphate
  modified_base 19: mod_base = OTHER; note = adenosine-3'-phosphate
  misc_feature 1..19: note = RNA
  misc_feature 20..21: note = DNA
cccggctcctgactacacatt

SEQ ID NO: 797 - DNA, 21 bp, synthetic construct
  source 1..21: mol_type = other DNA
  modified_base 1: mod_base = OTHER; note = guanosine-3'-phosphate
  modified_base 2: mod_base = OTHER; note = uridine-3'-phosphate
  modified_base 3: mod_base = OTHER; note = cytidine-3'-phosphate
  modified_base 4: mod_base = OTHER; note = adenosine-3'-phosphate
  modified_base 5: mod_base = OTHER; note = guanosine-3'-phosphate
  modified_base 6: mod_base = OTHER; note = guanosine-3'-phosphate
  modified_base 7: mod_base = OTHER; note = adenosine-3'-phosphate
  modified_base 8: mod_base = OTHER; note = guanosine-3'-phosphate
  modified_base 9: mod_base = OTHER; note = cytidine-3'-phosphate
  modified_base 10: mod_base = OTHER; note = cytidine-3'-phosphate
  modified_base 11: mod_base = OTHER; note = guanosine-3'-phosphate
  modified_base 12: mod_base = OTHER; note = guanosine-3'-phosphate
  modified_base 13: mod_base = OTHER; note = guanosine-3'-phosphate
  modified_base 14: mod_base = OTHER; note = adenosine-3'-phosphate
  modified_base 15: mod_base = OTHER; note = cytidine-3'-phosphate
  modified_base 16: mod_base = OTHER; note = guanosine-3'-phosphate
  modified_base 17: mod_base = OTHER; note = uridine-3'-phosphate
  modified_base 18: mod_base = OTHER; note = cytidine-3'-phosphate
  modified_base 19: mod_base = OTHER; note = adenosine-3'-phosphate
  modified_base 20: mod_base = OTHER; note = 2'-deoxythymidine-3'-phosphorothioate
  misc_feature 1..19: note = RNA
  misc_feature 20..21: note = DNA
gtcaggagccgggacgtcatt

SEQ ID NO: 798 - DNA, 21 bp, synthetic construct
  source 1..21: mol_type = other DNA
  modified_base 1: mod_base = OTHER; note = uridine-3'-phosphate
  modified_base 2: mod_base = OTHER; note = guanosine-3'-phosphate
  modified_base 3: mod_base = OTHER; note = adenosine-3'-phosphate
  modified_base 4: mod_base = OTHER; note = cytidine-3'-phosphate
  modified_base 5: mod_base = OTHER; note = guanosine-3'-phosphate
  modified_base 6: mod_base = OTHER; note = uridine-3'-phosphate
  modified_base 7: mod_base = OTHER; note = cytidine-3'-phosphate
  modified_base 8: mod_base = OTHER; note = cytidine-3'-phosphate
  modified_base 9: mod_base = OTHER; note = cytidine-3'-phosphate
  modified_base 10: mod_base = OTHER; note = guanosine-3'-phosphate
  modified_base 11: mod_base = OTHER; note = guanosine-3'-phosphate
  modified_base 12: mod_base = OTHER; note = cytidine-3'-phosphate
  modified_base 13: mod_base = OTHER; note = uridine-3'-phosphate
  modified_base 14: mod_base = OTHER; note = cytidine-3'-phosphate
  modified_base 15: mod_base = OTHER; note = cytidine-3'-phosphate
  modified_base 16: mod_base = OTHER; note = uridine-3'-phosphate
  modified_base 17: mod_base = OTHER; note = guanosine-3'-phosphate
  modified_base 18: mod_base = OTHER; note = adenosine-3'-phosphate
  modified_base 19: mod_base = OTHER; note = cytidine-3'-phosphate
  modified_base 20: mod_base = OTHER; note = 2'-deoxythymidine-3'-phosphorothioate
  misc_feature 1..19: note = RNA
  misc_feature 20..21: note = DNA
tgacgtcccggctcctgactt

SEQ ID NO: 799 - DNA, 21 bp, synthetic construct
  source 1..21: mol_type = other DNA
  modified_base 1: mod_base = OTHER; note = guanosine-3'-phosphate
  modified_base 2: mod_base = OTHER; note = 2'-O-methyluridine-3'-phosphate
  modified_base 3: mod_base = OTHER; note = 2'-O-methylcytidine-3'-phosphate
  modified_base 4: mod_base = OTHER; note = adenosine-3'-phosphate
  modified_base 5: mod_base = OTHER; note = guanosine-3'-phosphate
  modified_base 6: mod_base = OTHER; note = guanosine-3'-phosphate
  modified_base 7: mod_base = OTHER; note = adenosine-3'-phosphate
  modified_base 8: mod_base = OTHER; note = guanosine-3'-phosphate
  modified_base 9: mod_base = OTHER; note = 2'-O-methylcytidine-3'-phosphate
  modified_base 10: mod_base = OTHER; note = 2'-O-methylcytidine-3'-phosphate
  modified_base 11: mod_base = OTHER; note = guanosine-3'-phosphate
  modified_base 12: mod_base = OTHER; note = guanosine-3'-phosphate
  modified_base 13: mod_base = OTHER; note = guanosine-3'-phosphate
  modified_base 14: mod_base = OTHER; note = adenosine-3'-phosphate
  modified_base 15: mod_base = OTHER; note = 2'-O-methylcytidine-3'-phosphate
  modified_base 16: mod_base = OTHER; note = guanosine-3'-phosphate
  modified_base 17: mod_base = OTHER; note = 2'-O-methyluridine-3'-phosphate
  modified_base 18: mod_base = OTHER; note = 2'-O-methylcytidine-3'-phosphate
  modified_base 19: mod_base = OTHER; note = adenosine-3'-phosphate
  modified_base 20: mod_base = OTHER; note = 2'-deoxythymidine-3'-phosphorothioate
  misc_feature 1..19: note = RNA
  misc_feature 20..21: note = DNA
gtcaggagccgggacgtcatt

SEQ ID NO: 800 - DNA, 21 bp, synthetic construct
  source 1..21: mol_type = other DNA
  modified_base 1: mod_base = OTHER; note = uridine-3'-phosphate
  modified_base 2: mod_base = OTHER; note = guanosine-3'-phosphate
  modified_base 3: mod_base = OTHER; note = adenosine-3'-phosphate
  modified_base 4: mod_base = OTHER; note = cytidine-3'-phosphate
  modified_base 5: mod_base = OTHER; note = guanosine-3'-phosphate
  modified_base 6: mod_base = OTHER; note = uridine-3'-phosphate
  modified_base 7: mod_base = OTHER; note = cytidine-3'-phosphate
  modified_base 8: mod_base = OTHER; note = cytidine-3'-phosphate
  modified_base 9: mod_base = OTHER; note = cytidine-3'-phosphate
  modified_base 10: mod_base = OTHER; note = guanosine-3'-phosphate
  modified_base 11: mod_base = OTHER; note = guanosine-3'-phosphate
  modified_base 12: mod_base = OTHER; note = cytidine-3'-phosphate
  modified_base 13: mod_base = OTHER; note = uridine-3'-phosphate
  modified_base 14: mod_base = OTHER; note = cytidine-3'-phosphate
  modified_base 15: mod_base = OTHER; note = cytidine-3'-phosphate
  modified_base 16: mod_base = OTHER; note = uridine-3'-phosphate
  modified_base 17: mod_base = OTHER; note = guanosine-3'-phosphate
  modified_base 18: mod_base = OTHER; note = adenosine-3'-phosphate
  modified_base 19: mod_base = OTHER; note = cytidine-3'-phosphate
  modified_base 20: mod_base = OTHER; note = 2'-deoxythymidine-3'-phosphorothioate
  misc_feature 1..19: note = RNA
  misc_feature 20..21: note = DNA
tgacgtcccggctcctgactt

SEQ ID NO: 801 - DNA, 21 bp, synthetic construct
  source 1..21: mol_type = other DNA
  modified_base 1: mod_base = OTHER; note = uridine-3'-phosphate
  modified_base 2: mod_base = OTHER; note = cytidine-3'-phosphate
  modified_base 3: mod_base = OTHER; note = adenosine-3'-phosphate
  modified_base 4: mod_base = OTHER; note = guanosine-3'-phosphate
  modified_base 5: mod_base = OTHER; note = guanosine-3'-phosphate
  modified_base 6: mod_base = OTHER; note = adenosine-3'-phosphate
  modified_base 7: mod_base = OTHER; note = guanosine-3'-phosphate
  modified_base 8: mod_base = OTHER; note = cytidine-3'-phosphate
  modified_base 9: mod_base = OTHER; note = cytidine-3'-phosphate
  modified_base 10: mod_base = OTHER; note = guanosine-3'-phosphate
  modified_base 11: mod_base = OTHER; note = guanosine-3'-phosphate
  modified_base 12: mod_base = OTHER; note = guanosine-3'-phosphate
  modified_base 13: mod_base = OTHER; note = adenosine-3'-phosphate
  modified_base 14: mod_base = OTHER; note = cytidine-3'-phosphate
  modified_base 15: mod_base = OTHER; note = guanosine-3'-phosphate
  modified_base 16: mod_base = OTHER; note = uridine-3'-phosphate
  modified_base 17: mod_base = OTHER; note = cytidine-3'-phosphate
  modified_base 18: mod_base = OTHER; note = adenosine-3'-phosphate
  modified_base 19: mod_base = OTHER; note = guanosine-3'-phosphate
  modified_base 20: mod_base = OTHER; note = 2'-deoxythymidine-3'-phosphorothioate
  misc_feature 1..19: note = RNA
  misc_feature 20..21: note = DNA
tcaggagccgggacgtcagtt

SEQ ID NO: 802 - DNA, 21 bp, synthetic construct
  source 1..21: mol_type = other DNA
  modified_base 1: mod_base = OTHER; note = cytidine-3'-phosphate
  modified_base 2: mod_base = OTHER; note = uridine-3'-phosphate
  modified_base 3: mod_base = OTHER; note = guanosine-3'-phosphate
  modified_base 4: mod_base = OTHER; note = adenosine-3'-phosphate
  modified_base 5: mod_base = OTHER; note = cytidine-3'-phosphate
  modified_base 6: mod_base = OTHER; note = guanosine-3'-phosphate
  modified_base 7: mod_base = OTHER; note = uridine-3'-phosphate
  modified_base 8: mod_base = OTHER; note = cytidine-3'-phosphate
  modified_base 9: mod_base = OTHER; note = cytidine-3'-phosphate
  modified_base 10: mod_base = OTHER; note = cytidine-3'-phosphate
  modified_base 11: mod_base = OTHER; note = guanosine-3'-phosphate
  modified_base 12: mod_base = OTHER; note = guanosine-3'-phosphate
  modified_base 13: mod_base = OTHER; note = cytidine-3'-phosphate
  modified_base 14: mod_base = OTHER; note = uridine-3'-phosphate
  modified_base 15: mod_base = OTHER; note = cytidine-3'-phosphate
  modified_base 16: mod_base = OTHER; note = cytidine-3'-phosphate
  modified_base 17: mod_base = OTHER; note = uridine-3'-phosphate
  modified_base 18: mod_base = OTHER; note = guanosine-3'-phosphate
  modified_base 19: mod_base = OTHER; note = adenosine-3'-phosphate
  modified_base 20: mod_base = OTHER; note = 2'-deoxythymidine-3'-phosphorothioate
  misc_feature 1..19: note = RNA
  misc_feature 20..21: note = DNA
ctgacgtcccggctcctgatt

SEQ ID NO: 803 - DNA, 21 bp, synthetic construct
  source 1..21: mol_type = other DNA
  modified_base 1: mod_base = OTHER; note = 2'-O-methyluridine-3'-phosphate
  modified_base 2: mod_base = OTHER; note = 2'-O-methylcytidine-3'-phosphate
  modified_base 3: mod_base = OTHER; note = adenosine-3'-phosphate
  modified_base 4: mod_base = OTHER; note = guanosine-3'-phosphate
  modified_base 5: mod_base = OTHER; note = guanosine-3'-phosphate
  modified_base 6: mod_base = OTHER; note = adenosine-3'-phosphate
  modified_base 7: mod_base = OTHER; note = guanosine-3'-phosphate
  modified_base 8: mod_base = OTHER; note = 2'-O-methylcytidine-3'-phosphate
  modified_base 9: mod_base = OTHER; note = 2'-O-methylcytidine-3'-phosphate
  modified_base 10: mod_base = OTHER; note = guanosine-3'-phosphate
  modified_base 11: mod_base = OTHER; note = guanosine-3'-phosphate
  modified_base 12: mod_base = OTHER; note = guanosine-3'-phosphate
  modified_base 13: mod_base = OTHER; note = adenosine-3'-phosphate
  modified_base 14: mod_base = OTHER; note = 2'-O-methylcytidine-3'-phosphate
  modified_base 15: mod_base = OTHER; note = guanosine-3'-phosphate
  modified_base 16: mod_base = OTHER; note = 2'-O-methyluridine-3'-phosphate
  modified_base 17: mod_base = OTHER; note = 2'-O-methylcytidine-3'-phosphate
  modified_base 18: mod_base = OTHER; note = adenosine-3'-phosphate
  modified_base 19: mod_base = OTHER; note = guanosine-3'-phosphate
  modified_base 20: mod_base = OTHER; note = 2'-deoxythymidine-3'-phosphorothioate
  misc_feature 1..19: note = RNA
  misc_feature 20..21: note = DNA
tcaggagccgggacgtcagtt

SEQ ID NO: 804 - DNA, 21 bp, synthetic construct
  source 1..21: mol_type = other DNA
  modified_base 1: mod_base = OTHER; note = cytidine-3'-phosphate
  modified_base 2: mod_base = OTHER; note = uridine-3'-phosphate
  modified_base 3: mod_base = OTHER; note = guanosine-3'-phosphate
  modified_base 4: mod_base = OTHER; note = adenosine-3'-phosphate
  modified_base 5: mod_base = OTHER; note = cytidine-3'-phosphate
  modified_base 6: mod_base = OTHER; note = guanosine-3'-phosphate
  modified_base 7: mod_base = OTHER; note = uridine-3'-phosphate
  modified_base 8: mod_base = OTHER; note = cytidine-3'-phosphate
  modified_base 9: mod_base = OTHER; note = cytidine-3'-phosphate
  modified_base 10: mod_base = OTHER; note = cytidine-3'-phosphate
  modified_base 11: mod_base = OTHER; note = guanosine-3'-phosphate
  modified_base 12: mod_base = OTHER; note = guanosine-3'-phosphate
  modified_base 13: mod_base = OTHER; note = cytidine-3'-phosphate
  modified_base 14: mod_base = OTHER; note = uridine-3'-phosphate
  modified_base 15: mod_base = OTHER; note = cytidine-3'-phosphate
  modified_base 16: mod_base = OTHER; note = cytidine-3'-phosphate
  modified_base 17: mod_base = OTHER; note = uridine-3'-phosphate
  modified_base 18: mod_base = OTHER; note = guanosine-3'-phosphate
  modified_base 19: mod_base = OTHER; note = adenosine-3'-phosphate
  modified_base 20: mod_base = OTHER; note = 2'-deoxythymidine-3'-phosphorothioate
  misc_feature 1..19: note = RNA
  misc_feature 20..21: note = DNA
ctgacgtcccggctcctgatt

SEQ ID NO: 805 - DNA, 21 bp, synthetic construct
  source 1..21: mol_type = other DNA
  modified_base 1: mod_base = OTHER; note = cytidine-3'-phosphate
  modified_base 2: mod_base = OTHER; note = adenosine-3'-phosphate
  modified_base 3: mod_base = OTHER; note = guanosine-3'-phosphate
  modified_base 4: mod_base = OTHER; note = guanosine-3'-phosphate
  modified_base 5: mod_base = OTHER; note = adenosine-3'-phosphate
  modified_base 6: mod_base = OTHER; note = guanosine-3'-phosphate
  modified_base 7: mod_base = OTHER; note = cytidine-3'-phosphate
  modified_base 8: mod_base = OTHER; note = cytidine-3'-phosphate
  modified_base 9: mod_base = OTHER; note = guanosine-3'-phosphate
  modified_base 10: mod_base = OTHER; note = guanosine-3'-phosphate
  modified_base 11: mod_base = OTHER; note = guanosine-3'-phosphate
  modified_base 12: mod_base = OTHER; note = adenosine-3'-phosphate
  modified_base 13: mod_base = OTHER; note = cytidine-3'-phosphate
  modified_base 14: mod_base = OTHER; note = guanosine-3'-phosphate
  modified_base 15: mod_base = OTHER; note = uridine-3'-phosphate
  modified_base 16: mod_base = OTHER; note = cytidine-3'-phosphate
  modified_base 17: mod_base = OTHER; note = adenosine-3'-phosphate
  modified_base 18: mod_base = OTHER; note = guanosine-3'-phosphate
  modified_base 19: mod_base = OTHER; note = cytidine-3'-phosphate
  modified_base 20: mod_base = OTHER; note = 2'-deoxythymidine-3'-phosphorothioate
  misc_feature 1..19: note = RNA
  misc_feature 20..21: note = DNA
caggagccgggacgtcagctt

SEQ ID NO: 806 - DNA, 21 bp, synthetic construct
  source 1..21: mol_type = other DNA
  modified_base 1: mod_base = OTHER; note = guanosine-3'-phosphate
  modified_base 2: mod_base = OTHER; note = cytidine-3'-phosphate
  modified_base 3: mod_base = OTHER; note = uridine-3'-phosphate
  modified_base 4: mod_base = OTHER; note = guanosine-3'-phosphate
  modified_base 5: mod_base = OTHER; note = adenosine-3'-phosphate
  modified_base 6: mod_base = OTHER; note = cytidine-3'-phosphate
  modified_base 7: mod_base = OTHER; note = guanosine-3'-phosphate
  modified_base 8: mod_base = OTHER; note = uridine-3'-phosphate
  modified_base 9: mod_base = OTHER; note = cytidine-3'-phosphate
  modified_base 10: mod_base = OTHER; note = cytidine-3'-phosphate
  modified_base 11: mod_base = OTHER; note = cytidine-3'-phosphate
  modified_base 12: mod_base = OTHER; note = guanosine-3'-phosphate
  modified_base 13: mod_base = OTHER; note = guanosine-3'-phosphate
  modified_base 14: mod_base = OTHER; note = cytidine-3'-phosphate
  modified_base 15: mod_base = OTHER; note = uridine-3'-phosphate
  modified_base 16: mod_base = OTHER; note = cytidine-3'-phosphate
  modified_base 17: mod_base = OTHER; note = cytidine-3'-phosphate
  modified_base 18: mod_base = OTHER; note = uridine-3'-phosphate
  modified_base 19: mod_base = OTHER; note = guanosine-3'-phosphate
  modified_base 20: mod_base = OTHER; note = 2'-deoxythymidine-3'-phosphorothioate
  misc_feature 1..19: note = RNA
  misc_feature 20..21: note = DNA
gctgacgtcccggctcctgtt

SEQ ID NO: 807 - DNA, 21 bp, synthetic construct
  source 1..21: mol_type = other DNA
  modified_base 1: mod_base = OTHER; note = 2'-O-methylcytidine-3'-phosphate
  modified_base 2: mod_base = OTHER; note = adenosine-3'-phosphate
  modified_base 3: mod_base = OTHER; note = guanosine-3'-phosphate
  modified_base 4: mod_base = OTHER; note = guanosine-3'-phosphate
  modified_base 5: mod_base = OTHER; note = adenosine-3'-phosphate
  modified_base 6: mod_base = OTHER; note = guanosine-3'-phosphate
  modified_base 7: mod_base = OTHER; note = 2'-O-methylcytidine-3'-phosphate
  modified_base 8: mod_base = OTHER; note = 2'-O-methylcytidine-3'-phosphate
  modified_base 9: mod_base = OTHER; note = guanosine-3'-phosphate
  modified_base 10: mod_base = OTHER; note = guanosine-3'-phosphate
  modified_base 11: mod_base = OTHER; note = guanosine-3'-phosphate
  modified_base 12: mod_base = OTHER; note = adenosine-3'-phosphate
  modified_base 13: mod_base = OTHER; note = 2'-O-methylcytidine-3'-phosphate
  modified_base 14: mod_base = OTHER; note = guanosine-3'-phosphate
  modified_base 15: mod_base = OTHER; note = 2'-O-methyluridine-3'-phosphate
  modified_base 16: mod_base = OTHER; note = 2'-O-methylcytidine-3'-phosphate
  modified_base 17: mod_base = OTHER; note = adenosine-3'-phosphate
  modified_base 18: mod_base = OTHER; note = guanosine-3'-phosphate
  modified_base 19: mod_base = OTHER; note = 2'-O-methylcytidine-3'-phosphate
  modified_base 20: mod_base = OTHER; note = 2'-deoxythymidine-3'-phosphorothioate
  misc_feature 1..19: note = RNA
  misc_feature 20..21: note = DNA
caggagccgggacgtcagctt

SEQ ID NO: 808 - DNA, 21 bp, synthetic construct
  source 1..21: mol_type = other DNA
  modified_base 1: mod_base = OTHER; note = guanosine-3'-phosphate
  modified_base 2: mod_base = OTHER; note = cytidine-3'-phosphate
  modified_base 3: mod_base = OTHER; note = uridine-3'-phosphate
  modified_base 4: mod_base = OTHER; note = guanosine-3'-phosphate
  modified_base 5: mod_base = OTHER; note = adenosine-3'-phosphate
  modified_base 6: mod_base = OTHER; note = cytidine-3'-phosphate
  modified_base 7: mod_base = OTHER; note = guanosine-3'-phosphate
  modified_base 8: mod_base = OTHER; note = uridine-3'-phosphate
  modified_base 9: mod_base = OTHER; note = cytidine-3'-phosphate
  modified_base 10: mod_base = OTHER; note = cytidine-3'-phosphate
  modified_base 11: mod_base = OTHER; note = cytidine-3'-phosphate
  modified_base 12: mod_base = OTHER; note = guanosine-3'-phosphate
  modified_base 13: mod_base = OTHER; note = guanosine-3'-phosphate
  modified_base 14: mod_base = OTHER; note = cytidine-3'-phosphate
  modified_base 15: mod_base = OTHER; note = uridine-3'-phosphate
  modified_base 16: mod_base = OTHER; note = cytidine-3'-phosphate
  modified_base 17: mod_base = OTHER; note = cytidine-3'-phosphate
  modified_base 18: mod_base = OTHER; note = uridine-3'-phosphate
  modified_base 19: mod_base = OTHER; note = guanosine-3'-phosphate
  modified_base 20: mod_base = OTHER; note = 2'-deoxythymidine-3'-phosphorothioate
  misc_feature 1..19: note = RNA
  misc_feature 20..21: note = DNA
gctgacgtcccggctcctgtt

SEQ ID NO: 809 - DNA, 21 bp, synthetic construct
  source 1..21: mol_type = other DNA
  modified_base 1: mod_base = OTHER; note = adenosine-3'-phosphate
  modified_base 2: mod_base = OTHER; note = guanosine-3'-phosphate
  modified_base 3: mod_base = OTHER; note = cytidine-3'-phosphate
  modified_base 4: mod_base = OTHER; note = cytidine-3'-phosphate
  modified_base 5: mod_base = OTHER; note = guanosine-3'-phosphate
  modified_base 6: mod_base = OTHER; note = guanosine-3'-phosphate
  modified_base 7: mod_base = OTHER; note = guanosine-3'-phosphate
  modified_base 8: mod_base = OTHER; note = adenosine-3'-phosphate
  modified_base 9: mod_base = OTHER; note = cytidine-3'-phosphate
  modified_base 10: mod_base = OTHER; note = guanosine-3'-phosphate
  modified_base 11: mod_base = OTHER; note = uridine-3'-phosphate
  modified_base 12: mod_base = OTHER; note = cytidine-3'-phosphate
  modified_base 13: mod_base = OTHER; note = adenosine-3'-phosphate
  modified_base 14: mod_base = OTHER; note = guanosine-3'-phosphate
  modified_base 15: mod_base = OTHER; note = cytidine-3'-phosphate
  modified_base 16: mod_base = OTHER; note = adenosine-3'-phosphate
  modified_base 17: mod_base = OTHER; note = cytidine-3'-phosphate
  modified_base 18: mod_base = OTHER; note = uridine-3'-phosphate
  modified_base 19: mod_base = OTHER; note = adenosine-3'-phosphate
  misc_feature 1..19: note = RNA
  misc_feature 20..21: note = DNA
agccgggacgtcagcactatt

SEQ ID NO: 810 - DNA, 21 bp, synthetic construct
  source 1..21: mol_type = other DNA
  modified_base 1: mod_base = OTHER; note = uridine-3'-phosphate
  modified_base 2: mod_base = OTHER; note = adenosine-3'-phosphate
  modified_base 3: mod_base = OTHER; note = guanosine-3'-phosphate
  modified_base 4: mod_base = OTHER; note = uridine-3'-phosphate
  modified_base 5: mod_base = OTHER; note = guanosine-3'-phosphate
  modified_base 6: mod_base = OTHER; note = cytidine-3'-phosphate
  modified_base 7: mod_base = OTHER; note = uridine-3'-phosphate
  modified_base 8: mod_base = OTHER; note = guanosine-3'-phosphate
  modified_base 9: mod_base = OTHER; note = adenosine-3'-phosphate
  modified_base 10: mod_base = OTHER; note = cytidine-3'-phosphate
  modified_base 11: mod_base = OTHER; note = guanosine-3'-phosphate
  modified_base 12: mod_base = OTHER; note = uridine-3'-phosphate
  modified_base 13: mod_base = OTHER; note = cytidine-3'-phosphate
  modified_base 14: mod_base = OTHER; note = cytidine-3'-phosphate
  modified_base 15: mod_base = OTHER; note = cytidine-3'-phosphate
  modified_base 16: mod_base = OTHER; note = guanosine-3'-phosphate
  modified_base 17: mod_base = OTHER; note = guanosine-3'-phosphate
  modified_base 18: mod_base = OTHER; note = cytidine-3'-phosphate
  modified_base 19: mod_base = OTHER; note = uridine-3'-phosphate
  misc_feature 1..19: note = RNA
  misc_feature 20..21: note = DNA
tagtgctgacgtcccggcttt

SEQ ID NO: 811 - DNA, 21 bp, synthetic construct
  source 1..21: mol_type = other DNA
  modified_base 1: mod_base = OTHER; note = cytidine-3'-phosphate
  modified_base 2: mod_base = OTHER; note = cytidine-3'-phosphate
  modified_base 3: mod_base = OTHER; note = guanosine-3'-phosphate
  modified_base 4: mod_base = OTHER; note = guanosine-3'-phosphate
  modified_base 5: mod_base = OTHER; note = guanosine-3'-phosphate
  modified_base 6: mod_base = OTHER; note = adenosine-3'-phosphate
  modified_base 7: mod_base = OTHER; note = cytidine-3'-phosphate
  modified_base 8: mod_base = OTHER; note = guanosine-3'-phosphate
  modified_base 9: mod_base = OTHER; note = uridine-3'-phosphate
  modified_base 10: mod_base = OTHER; note = cytidine-3'-phosphate
  modified_base 11: mod_base = OTHER; note = adenosine-3'-phosphate
  modified_base 12: mod_base = OTHER; note = guanosine-3'-phosphate
  modified_base 13: mod_base = OTHER; note = cytidine-3'-phosphate
  modified_base 14: mod_base = OTHER; note = adenosine-3'-phosphate
  modified_base 15: mod_base = OTHER; note = cytidine-3'-phosphate
  modified_base 16: mod_base = OTHER; note = uridine-3'-phosphate
  modified_base 17: mod_base = OTHER; note = adenosine-3'-phosphate
  modified_base 18: mod_base = OTHER; note = cytidine-3'-phosphate
  modified_base 19: mod_base = OTHER; note = adenosine-3'-phosphate
  misc_feature 1..19: note = RNA
  misc_feature 20..21: note = DNA
ccgggacgtcagcactacatt

SEQ ID NO: 812 - DNA, 21 bp, synthetic construct
  source 1..21: mol_type = other DNA
  modified_base 1: mod_base = OTHER; note = uridine-3'-phosphate
  modified_base 2: mod_base = OTHER; note = guanosine-3'-phosphate
  modified_base 3: mod_base = OTHER; note = uridine-3'-phosphate
  modified_base 4: mod_base = OTHER; note = adenosine-3'-phosphate
  modified_base 5: mod_base = OTHER; note = guanosine-3'-phosphate
  modified_base 6: mod_base = OTHER; note = uridine-3'-phosphate
  modified_base 7: mod_base = OTHER; note = guanosine-3'-phosphate
  modified_base 8: mod_base = OTHER; note = cytidine-3'-phosphate
  modified_base 9: mod_base = OTHER; note = uridine-3'-phosphate
  modified_base 10: mod_base = OTHER; note = guanosine-3'-phosphate
  modified_base 11: mod_base = OTHER; note = adenosine-3'-phosphate
  modified_base 12: mod_base = OTHER; note = cytidine-3'-phosphate
  modified_base 13: mod_base = OTHER; note = guanosine-3'-phosphate
  modified_base 14: mod_base = OTHER; note = uridine-3'-phosphate
  modified_base 15: mod_base = OTHER; note = cytidine-3'-phosphate
  modified_base 16: mod_base = OTHER; note = cytidine-3'-phosphate
  modified_base 17: mod_base = OTHER; note = cytidine-3'-phosphate
  modified_base 18: mod_base = OTHER; note = guanosine-3'-phosphate
  modified_base 19: mod_base = OTHER; note = guanosine-3'-phosphate
  misc_feature 1..19: note = RNA
  misc_feature 20..21: note = DNA
tgtagtgctgacgtcccggtt

SEQ ID NO: 813 - DNA, 21 bp, synthetic construct
  source 1..21: mol_type = other DNA
  modified_base 1: mod_base = OTHER; note = cytidine-3'-phosphate
  modified_base 2: mod_base = OTHER; note = cytidine-3'-phosphate
  modified_base 3: mod_base = OTHER; note = guanosine-3'-phosphate
  modified_base 4: mod_base = OTHER; note = uridine-3'-phosphate
  modified_base 5: mod_base = OTHER; note = guanosine-3'-phosphate
  modified_base 6: mod_base = OTHER; note = adenosine-3'-phosphate
  modified_base 7: mod_base = OTHER; note = cytidine-3'-phosphate
  modified_base 8: mod_base = OTHER; note = adenosine-3'-phosphate
  modified_base 9: mod_base = OTHER; note = guanosine-3'-phosphate
  modified_base 10: mod_base = OTHER; note = cytidine-3'-phosphate
  modified_base 11: mod_base = OTHER; note = cytidine-3'-phosphate
  modified_base 12: mod_base = OTHER; note = guanosine-3'-phosphate
  modified_base 13: mod_base = OTHER; note = uridine-3'-phosphate
  modified_base 14: mod_base = OTHER; note = uridine-3'-phosphate
  modified_base 15: mod_base = OTHER; note = guanosine-3'-phosphate
  modified_base 16: mod_base = OTHER; note = cytidine-3'-phosphate
  modified_base 17: mod_base = OTHER; note = cytidine-3'-phosphate
  modified_base 18: mod_base = OTHER; note = adenosine-3'-phosphate
  modified_base 19: mod_base = OTHER; note = uridine-3'-phosphate
  misc_feature 1..19: note = RNA
  misc_feature 20..21: note = DNA
ccgtgacagccgttgccattt

SEQ ID NO: 814 - DNA, 21 bp, synthetic construct
  source 1..21: mol_type = other DNA
  modified_base 1: mod_base = OTHER; note = adenosine-3'-phosphate
  modified_base 2: mod_base = OTHER; note = uridine-3'-phosphate
  modified_base 3: mod_base = OTHER; note = guanosine-3'-phosphate
  modified_base 4: mod_base = OTHER; note = guanosine-3'-phosphate
  modified_base 5: mod_base = OTHER; note = cytidine-3'-phosphate
  modified_base 6: mod_base = OTHER; note = adenosine-3'-phosphate
  modified_base 7: mod_base = OTHER; note = adenosine-3'-phosphate
  modified_base 8: mod_base = OTHER; note = cytidine-3'-phosphate
  modified_base 9: mod_base = OTHER; note = guanosine-3'-phosphate
  modified_base 10: mod_base = OTHER; note = guanosine-3'-phosphate
  modified_base 11: mod_base = OTHER; note = cytidine-3'-phosphate
  modified_base 12: mod_base = OTHER; note = uridine-3'-phosphate
  modified_base 13: mod_base = OTHER; note = guanosine-3'-phosphate
  modified_base 14: mod_base = OTHER; note = uridine-3'-phosphate
  modified_base 15: mod_base = OTHER; note = cytidine-3'-phosphate
  modified_base 16: mod_base = OTHER; note = adenosine-3'-phosphate
  modified_base 17: mod_base = OTHER; note = cytidine-3'-phosphate
  modified_base 18: mod_base = OTHER; note = guanosine-3'-phosphate
  modified_base 19: mod_base = OTHER; note = guanosine-3'-phosphate
  misc_feature 1..19: note = RNA
  misc_feature 20..21: note = DNA
atggcaacggctgtcacggtt

SEQ ID NO: 815 - DNA, 21 bp, synthetic construct
  source 1..21: mol_type = other DNA
  modified_base 1: mod_base = OTHER; note = guanosine-3'-phosphate
  modified_base 2: mod_base = OTHER; note = cytidine-3'-phosphate
  modified_base 3: mod_base = OTHER; note = cytidine-3'-phosphate
  modified_base 4: mod_base = OTHER; note = adenosine-3'-phosphate
  modified_base 5: mod_base = OTHER; note = uridine-3'-phosphate
  modified_base 6: mod_base = OTHER; note = cytidine-3'-phosphate
  modified_base 7: mod_base = OTHER; note = uridine-3'-phosphate
  modified_base 8: mod_base = OTHER; note = guanosine-3'-phosphate
  modified_base 9: mod_base = OTHER; note = cytidine-3'-phosphate
  modified_base 10: mod_base = OTHER; note = uridine-3'-phosphate
  modified_base 11: mod_base = OTHER; note = guanosine-3'-phosphate
  modified_base 12: mod_base = OTHER; note = cytidine-3'-phosphate
  modified_base 13: mod_base = OTHER; note = cytidine-3'-phosphate
  modified_base 14: mod_base = OTHER; note = guanosine-3'-phosphate
  modified_base 15: mod_base = OTHER; note = guanosine-3'-phosphate
  modified_base 16: mod_base = OTHER; note = adenosine-3'-phosphate
  modified_base 17: mod_base = OTHER; note = guanosine-3'-phosphate
  modified_base 18: mod_base = OTHER; note = cytidine-3'-phosphate
  modified_base 19: mod_base = OTHER; note = cytidine-3'-phosphate
  modified_base 20: mod_base = OTHER; note = 2'-deoxythymidine-3'-phosphorothioate
  misc_feature 1..19: note = RNA
  misc_feature 20..21: note = DNA
gccatctgctgccggagcctt

SEQ ID NO: 816 - DNA, 21 bp, synthetic construct
  source 1..21: mol_type = other DNA
  modified_base 1: mod_base = OTHER; note = guanosine-3'-phosphate
  modified_base 2: mod_base = OTHER; note = guanosine-3'-phosphate
  modified_base 3: mod_base = OTHER; note = cytidine-3'-phosphate
  modified_base 4: mod_base = OTHER; note = uridine-3'-phosphate
  modified_base 5: mod_base = OTHER; note = cytidine-3'-phosphate
  modified_base 6: mod_base = OTHER; note = cytidine-3'-phosphate
  modified_base 7: mod_base = OTHER; note = guanosine-3'-phosphate
  modified_base 8: mod_base = OTHER; note = guanosine-3'-phosphate
  modified_base 9: mod_base = OTHER; note = cytidine-3'-phosphate
  modified_base 10: mod_base = OTHER; note = adenosine-3'-phosphate
  modified_base 11: mod_base = OTHER; note = guanosine-3'-phosphate
  modified_base 12: mod_base = OTHER; note = cytidine-3'-phosphate
  modified_base 13: mod_base = OTHER; note = adenosine-3'-phosphate
  modified_base 14: mod_base = OTHER; note = guanosine-3'-phosphate
  modified_base 15: mod_base = OTHER; note = adenosine-3'-phosphate
  modified_base 16: mod_base = OTHER; note = uridine-3'-phosphate
  modified_base 17: mod_base = OTHER; note = guanosine-3'-phosphate
  modified_base 18: mod_base = OTHER; note = guanosine-3'-phosphate
  modified_base 19: mod_base = OTHER; note = cytidine-3'-phosphate
  modified_base 20: mod_base = OTHER; note = 2'-deoxythymidine-3'-phosphorothioate
  misc_feature 1..19: note = RNA
  misc_feature 20..21: note = DNA
ggctccggcagcagatggctt

SEQ ID NO: 817 - DNA, 21 bp, synthetic construct
  source 1..21: mol_type = other DNA
  modified_base 1: mod_base = OTHER; note = cytidine-3'-phosphate
  modified_base 2: mod_base = OTHER; note = cytidine-3'-phosphate
  modified_base 3: mod_base = OTHER; note = cytidine-3'-phosphate
  modified_base 4: mod_base = OTHER; note = adenosine-3'-phosphate
  modified_base 5: mod_base = OTHER; note = uridine-3'-phosphate
  modified_base 6: mod_base = OTHER; note = cytidine-3'-phosphate
  modified_base 7: mod_base = OTHER; note = cytidine-3'-phosphate
  modified_base 8: mod_base = OTHER; note = cytidine-3'-phosphate
  modified_base 9: mod_base = OTHER; note = adenosine-3'-phosphate
  modified_base 10: mod_base = OTHER; note = guanosine-3'-phosphate
  modified_base 11: mod_base = OTHER; note = guanosine-3'-phosphate
  modified_base 12: mod_base = OTHER; note = adenosine-3'-phosphate
  modified_base 13: mod_base = OTHER; note = uridine-3'-phosphate
  modified_base 14: mod_base = OTHER; note = guanosine-3'-phosphate
  modified_base 15: mod_base = OTHER; note = guanosine-3'-phosphate
  modified_base 16: mod_base = OTHER; note = guanosine-3'-phosphate
  modified_base 17: mod_base = OTHER; note = uridine-3'-phosphate
  modified_base 18: mod_base = OTHER; note = guanosine-3'-phosphate
  modified_base 19: mod_base = OTHER; note = uridine-3'-phosphate
  misc_feature 1..19: note = RNA
  misc_feature 20..21: note = DNA
cccatcccaggatgggtgttt

SEQ ID NO: 818 - DNA, 21 bp, synthetic construct
  source 1..21: mol_type = other DNA
  modified_base 1: mod_base = OTHER; note = adenosine-3'-phosphate
  modified_base 2: mod_base = OTHER; note = cytidine-3'-phosphate
  modified_base 3: mod_base = OTHER; note = adenosine-3'-phosphate
  modified_base 4: mod_base = OTHER; note = cytidine-3'-phosphate
  modified_base 5: mod_base = OTHER; note = cytidine-3'-phosphate
  modified_base 6: mod_base = OTHER; note = cytidine-3'-phosphate
  modified_base 7: mod_base = OTHER; note = adenosine-3'-phosphate
  modified_base 8: mod_base = OTHER; note = uridine-3'-phosphate
  modified_base 9: mod_base = OTHER; note = cytidine-3'-phosphate
  modified_base 10: mod_base = OTHER; note = cytidine-3'-phosphate
  modified_base 11: mod_base = OTHER; note = uridine-3'-phosphate
  modified_base 12: mod_base = OTHER; note = guanosine-3'-phosphate
  modified_base 13: mod_base = OTHER; note = guanosine-3'-phosphate
  modified_base 14: mod_base = OTHER; note = guanosine-3'-phosphate
  modified_base 15: mod_base = OTHER; note = adenosine-3'-phosphate
  modified_base 16: mod_base = OTHER; note = uridine-3'-phosphate
  modified_base 17: mod_base = OTHER; note = guanosine-3'-phosphate
  modified_base 18: mod_base = OTHER; note = guanosine-3'-phosphate
  modified_base 19: mod_base = OTHER; note = guanosine-3'-phosphate
  misc_feature 1..19: note = RNA
  misc_feature 20..21: note = DNA
acacccatcctgggatgggtt

SEQ ID NO: 819 - DNA, 21 bp, synthetic construct
  source 1..21: mol_type = other DNA
  modified_base 1: mod_base = OTHER; note = cytidine-3'-phosphate
  modified_base 2: mod_base = OTHER; note = adenosine-3'-phosphate
  modified_base 3: mod_base = OTHER; note = uridine-3'-phosphate
  modified_base 4: mod_base = OTHER; note = cytidine-3'-phosphate
  modified_base 5: mod_base = OTHER; note = cytidine-3'-phosphate
  modified_base 6: mod_base = OTHER; note = cytidine-3'-phosphate
  modified_base 7: mod_base = OTHER; note = adenosine-3'-phosphate
  modified_base 8: mod_base = OTHER; note = guanosine-3'-phosphate
  modified_base 9: mod_base = OTHER; note = guanosine-3'-phosphate
  modified_base 10: mod_base = OTHER; note = adenosine-3'-phosphate
  modified_base 11: mod_base = OTHER; note = uridine-3'-phosphate
  modified_base 12: mod_base = OTHER; note = guanosine-3'-phosphate
  modified_base 13: mod_base = OTHER; note = guanosine-3'-phosphate
  modified_base 14: mod_base = OTHER; note = guanosine-3'-phosphate
  modified_base 15: mod_base = OTHER; note = uridine-3'-phosphate
  modified_base 16: mod_base = OTHER; note = guanosine-3'-phosphate
  modified_base 17: mod_base = OTHER; note = uridine-3'-phosphate
  modified_base 18: mod_base = OTHER; note = cytidine-3'-phosphate
  modified_base 19: mod_base = OTHER; note = uridine-3'-phosphate
  misc_feature 1..19: note = RNA
  misc_feature 20..21: note = DNA
catcccaggatgggtgtcttt

SEQ ID NO: 820 - DNA, 21 bp, synthetic construct
  source 1..21: mol_type = other DNA
  modified_base 1: mod_base = OTHER; note = adenosine-3'-phosphate
  modified_base 2: mod_base = OTHER; note = guanosine-3'-phosphate
  modified_base 3: mod_base = OTHER; note = adenosine-3'-phosphate
  modified_base 4: mod_base = OTHER; note = cytidine-3'-phosphate
  modified_base 5: mod_base = OTHER; note = adenosine-3'-phosphate
  modified_base 6: mod_base = OTHER; note = cytidine-3'-phosphate
  modified_base 7: mod_base = OTHER; note = cytidine-3'-phosphate
  modified_base 8: mod_base = OTHER; note = cytidine-3'-phosphate
  modified_base 9: mod_base = OTHER; note = adenosine-3'-phosphate
  modified_base 10: mod_base = OTHER; note = uridine-3'-phosphate
  modified_base 11: mod_base = OTHER; note = cytidine-3'-phosphate
  modified_base 12: mod_base = OTHER; note = cytidine-3'-phosphate
  modified_base 13: mod_base = OTHER; note = uridine-3'-phosphate
  modified_base 14: mod_base = OTHER; note = guanosine-3'-phosphate
  modified_base 15: mod_base = OTHER; note = guanosine-3'-phosphate
  modified_base 16: mod_base = OTHER; note = guanosine-3'-phosphate
  modified_base 17: mod_base = OTHER; note = adenosine-3'-phosphate
  modified_base 18: mod_base = OTHER; note = uridine-3'-phosphate
  modified_base 19: mod_base = OTHER; note = guanosine-3'-phosphate
  misc_feature 1..19: note = RNA
  misc_feature 20..21: note = DNA
agacacccatcctgggatgtt

SEQ ID NO: 821 - DNA, 21 bp, synthetic construct
  source 1..21: mol_type = other DNA
  modified_base 1: mod_base = OTHER; note = adenosine-3'-phosphate
  modified_base 2: mod_base = OTHER; note = guanosine-3'-phosphate
  modified_base 3: mod_base = OTHER; note = cytidine-3'-phosphate
  modified_base 4: mod_base = OTHER; note = uridine-3'-phosphate
  modified_base 5: mod_base = OTHER; note = uridine-3'-phosphate
  modified_base 6: mod_base = OTHER; note = uridine-3'-phosphate
  modified_base 7: mod_base = OTHER; note = adenosine-3'-phosphate
  modified_base 8: mod_base = OTHER; note = adenosine-3'-phosphate
  modified_base 9: mod_base = OTHER; note = adenosine-3'-phosphate
  modified_base 10: mod_base = OTHER; note = adenosine-3'-phosphate
  modified_base 11: mod_base = OTHER; note = uridine-3'-phosphate
  modified_base 12: mod_base = OTHER; note = guanosine-3'-phosphate
  modified_base 13: mod_base = OTHER; note = guanosine-3'-phosphate
  modified_base 14: mod_base = OTHER; note = uridine-3'-phosphate
  modified_base 15: mod_base = OTHER; note = uridine-3'-phosphate
  modified_base 16: mod_base = OTHER; note = cytidine-3'-phosphate
  modified_base 17: mod_base = OTHER; note = cytidine-3'-phosphate
  modified_base 18: mod_base = OTHER; note = guanosine-3'-phosphate
  modified_base 19: mod_base = OTHER; note = adenosine-3'-phosphate
  misc_feature 1..19: note = RNA
  misc_feature 20..21: note = DNA
agctttaaaatggttccgatt

SEQ ID NO: 822 - DNA, 21 bp, synthetic construct
  source 1..21: mol_type = other DNA
  modified_base 1: mod_base = OTHER; note = uridine-3'-phosphate
  modified_base 2: mod_base = OTHER; note = cytidine-3'-phosphate
  modified_base 3: mod_base = OTHER; note = guanosine-3'-phosphate
  modified_base 4: mod_base = OTHER; note = guanosine-3'-phosphate
  modified_base 5: mod_base = OTHER; note = adenosine-3'-phosphate
  modified_base 6: mod_base = OTHER; note = adenosine-3'-phosphate
  modified_base 7: mod_base = OTHER; note = cytidine-3'-phosphate
  modified_base 8: mod_base = OTHER; note = cytidine-3'-phosphate
  modified_base 9: mod_base = OTHER; note = adenosine-3'-phosphate
  modified_base 10: mod_base = OTHER; note = uridine-3'-phosphate
  modified_base 11: mod_base = OTHER; note = uridine-3'-phosphate
  modified_base 12: mod_base = OTHER; note = uridine-3'-phosphate
  modified_base 13: mod_base = OTHER; note = uridine-3'-phosphate
  modified_base 14: mod_base = OTHER; note = adenosine-3'-phosphate
  modified_base 15: mod_base = OTHER; note = adenosine-3'-phosphate
  modified_base 16: mod_base = OTHER; note = adenosine-3'-phosphate
  modified_base 17: mod_base = OTHER; note = guanosine-3'-phosphate
  modified_base 18: mod_base = OTHER; note = cytidine-3'-phosphate
  modified_base 19: mod_base = OTHER; note = uridine-3'-phosphate
  misc_feature 1..19: note = RNA
  misc_feature 20..21: note = DNA
tcggaaccattttaaagcttt

SEQ ID NO: 823 - DNA, 21 bp, synthetic construct
  source 1..21: mol_type = other DNA
  modified_base 1: mod_base = OTHER; note = guanosine-3'-phosphate
  modified_base 2: mod_base = OTHER; note = cytidine-3'-phosphate
  modified_base 3: mod_base = OTHER; note = uridine-3'-phosphate
  modified_base 4: mod_base = OTHER; note = uridine-3'-phosphate
  modified_base 5: mod_base = OTHER; note = uridine-3'-phosphate
  modified_base 6: mod_base = OTHER; note = adenosine-3'-phosphate
  modified_base 7: mod_base = OTHER; note = adenosine-3'-phosphate
  modified_base 8: mod_base = OTHER; note = adenosine-3'-phosphate
  modified_base 9: mod_base = OTHER; note = adenosine-3'-phosphate
  modified_base 10: mod_base = OTHER; note = uridine-3'-phosphate
  modified_base 11: mod_base = OTHER; note = guanosine-3'-phosphate
  modified_base 12: mod_base = OTHER; note = guanosine-3'-phosphate
  modified_base 13: mod_base = OTHER; note = uridine-3'-phosphate
  modified_base 14: mod_base = OTHER; note = uridine-3'-phosphate
  modified_base 15: mod_base = OTHER; note = cytidine-3'-phosphate
  modified_base 16: mod_base = OTHER; note = cytidine-3'-phosphate
  modified_base 17: mod_base = OTHER; note = guanosine-3'-phosphate
  modified_base 18: mod_base = OTHER; note = adenosine-3'-phosphate
  modified_base 19: mod_base = OTHER; note = cytidine-3'-phosphate
  misc_feature 1..19: note = RNA
  misc_feature 20..21: note = DNA
gctttaaaatggttccgactt

SEQ ID NO: 824 - DNA, 21 bp, synthetic construct
  source 1..21: mol_type = other DNA
  modified_base 1: mod_base = OTHER; note = guanosine-3'-phosphate
  modified_base 2: mod_base = OTHER; note = uridine-3'-phosphate
  modified_base 3: mod_base = OTHER; note = cytidine-3'-phosphate
  modified_base 4: mod_base = OTHER; note = guanosine-3'-phosphate
  modified_base 5: mod_base = OTHER; note = guanosine-3'-phosphate
  modified_base 6: mod_base = OTHER; note = adenosine-3'-phosphate
  modified_base 7: mod_base = OTHER; note = adenosine-3'-phosphate
  modified_base 8: mod_base = OTHER; note = cytidine-3'-phosphate
  modified_base 9: mod_base = OTHER; note = cytidine-3'-phosphate
  modified_base 10: mod_base = OTHER; note = adenosine-3'-phosphate
  modified_base 11: mod_base = OTHER; note = uridine-3'-phosphate
  modified_base 12: mod_base = OTHER; note = uridine-3'-phosphate
  modified_base 13: mod_base = OTHER; note = uridine-3'-phosphate
  modified_base 14: mod_base = OTHER; note = uridine-3'-phosphate
  modified_base 15: mod_base = OTHER; note = adenosine-3'-phosphate
  modified_base 16: mod_base = OTHER; note = adenosine-3'-phosphate
  modified_base 17: mod_base = OTHER; note = adenosine-3'-phosphate
  modified_base 18: mod_base = OTHER; note = guanosine-3'-phosphate
  modified_base 19: mod_base = OTHER; note = cytidine-3'-phosphate
  misc_feature 1..19: note = RNA
  misc_feature 20..21: note = DNA
gtcggaaccattttaaagctt

SEQ ID NO: 825 - DNA, 21 bp, synthetic construct
  source 1..21: mol_type = other DNA
  modified_base 1: mod_base = OTHER; note = cytidine-3'-phosphate
  modified_base 2: mod_base = OTHER; note = uridine-3'-phosphate
  modified_base 3: mod_base = OTHER; note = uridine-3'-phosphate
  modified_base 4: mod_base = OTHER; note = uridine-3'-phosphate
  modified_base 5: mod_base = OTHER; note = adenosine-3'-phosphate
  modified_base 6: mod_base = OTHER; note = adenosine-3'-phosphate
  modified_base 7: mod_base = OTHER; note = adenosine-3'-phosphate
  modified_base 8: mod_base = OTHER; note = adenosine-3'-phosphate
  modified_base 9: mod_base = OTHER; note = uridine-3'-phosphate
  modified_base 10: mod_base = OTHER; note = guanosine-3'-phosphate
  modified_base 11: mod_base = OTHER; note = guanosine-3'-phosphate
  modified_base 12: mod_base = OTHER; note = uridine-3'-phosphate
  modified_base 13: mod_base = OTHER; note = uridine-3'-phosphate
  modified_base 14: mod_base = OTHER; note = cytidine-3'-phosphate
  modified_base 15: mod_base = OTHER; note = cytidine-3'-phosphate
  modified_base 16: mod_base = OTHER; note = guanosine-3'-phosphate
  modified_base 17: mod_base = OTHER; note = adenosine-3'-phosphate
  modified_base 18: mod_base = OTHER; note = cytidine-3'-phosphate
  modified_base 19: mod_base = OTHER; note = uridine-3'-phosphate
  misc_feature 1..19: note = RNA
  misc_feature 20..21: note = DNA
ctttaaaatggttccgacttt

SEQ ID NO: 826 - DNA, 21 bp, synthetic construct
  source 1..21: mol_type = other DNA
  modified_base 1: mod_base = OTHER; note = adenosine-3'-phosphate
  modified_base 2: mod_base = OTHER; note = guanosine-3'-phosphate
  modified_base 3: mod_base = OTHER; note = uridine-3'-phosphate
  modified_base 4: mod_base = OTHER; note = cytidine-3'-phosphate
  modified_base 5: mod_base = OTHER; note = guanosine-3'-phosphate
  modified_base 6: mod_base = OTHER; note = guanosine-3'-phosphate
  modified_base 7: mod_base = OTHER; note = adenosine-3'-phosphate
  modified_base 8: mod_base = OTHER; note = adenosine-3'-phosphate
  modified_base 9: mod_base = OTHER; note = cytidine-3'-phosphate
  modified_base 10: mod_base = OTHER; note = cytidine-3'-phosphate
  modified_base 11: mod_base = OTHER; note = adenosine-3'-phosphate
  modified_base 12: mod_base = OTHER; note = uridine-3'-phosphate
  modified_base 13: mod_base = OTHER; note = uridine-3'-phosphate
  modified_base 14: mod_base = OTHER; note = uridine-3'-phosphate
  modified_base 15: mod_base = OTHER; note = uridine-3'-phosphate
  modified_base 16: mod_base = OTHER; note = adenosine-3'-phosphate
  modified_base 17: mod_base = OTHER; note = adenosine-3'-phosphate
  modified_base 18: mod_base = OTHER; note = adenosine-3'-phosphate
  modified_base 19: mod_base = OTHER; note = guanosine-3'-phosphate
  misc_feature 1..19: note = RNA
  misc_feature 20..21: note = DNA
agtcggaaccattttaaagtt

SEQ ID NO: 827 - DNA, 21 bp, synthetic construct
  source 1..21: mol_type = other DNA
  modified_base 1: mod_base = OTHER; note = uridine-3'-phosphate
  modified_base 2: mod_base = OTHER; note = uridine-3'-phosphate
  modified_base 3: mod_base = OTHER; note = uridine-3'-phosphate
  modified_base 4: mod_base = OTHER; note = adenosine-3'-phosphate
  modified_base 5: mod_base = OTHER; note = adenosine-3'-phosphate
  modified_base 6: mod_base = OTHER; note = adenosine-3'-phosphate
  modified_base 7: mod_base = OTHER; note = adenosine-3'-phosphate
  modified_base 8: mod_base = OTHER; note = uridine-3'-phosphate
  modified_base 9: mod_base = OTHER; note = guanosine-3'-phosphate
  modified_base 10: mod_base = OTHER; note = guanosine-3'-phosphate
  modified_base 11: mod_base = OTHER; note = uridine-3'-phosphate
  modified_base 12: mod_base = OTHER; note = uridine-3'-phosphate
  modified_base 13: mod_base = OTHER; note = cytidine-3'-phosphate
  modified_base 14: mod_base = OTHER; note = cytidine-3'-phosphate
  modified_base 15: mod_base = OTHER; note = guanosine-3'-phosphate
  modified_base 16: mod_base = OTHER; note = adenosine-3'-phosphate
  modified_base 17: mod_base = OTHER; note = cytidine-3'-phosphate
  modified_base 18: mod_base = OTHER; note = uridine-3'-phosphate
  modified_base 19: mod_base = OTHER; note = uridine-3'-phosphate
  misc_feature 1..19: note = RNA
  misc_feature 20..21: note = DNA
tttaaaatggttccgactttt

SEQ ID NO: 828 - DNA, 21 bp, synthetic construct
  source 1..21: mol_type = other DNA
  modified_base 1: mod_base = OTHER; note = adenosine-3'-phosphate
  modified_base 2: mod_base = OTHER; note = adenosine-3'-phosphate
  modified_base 3: mod_base = OTHER; note = guanosine-3'-phosphate
  modified_base 4: mod_base = OTHER; note = uridine-3'-phosphate
  modified_base 5: mod_base = OTHER; note = cytidine-3'-phosphate
  modified_base 6: mod_base = OTHER; note = guanosine-3'-phosphate
  modified_base 7: mod_base = OTHER; note = guanosine-3'-phosphate
  modified_base 8: mod_base = OTHER; note = adenosine-3'-phosphate
  modified_base 9: mod_base = OTHER; note = adenosine-3'-phosphate
  modified_base 10: mod_base = OTHER; note = cytidine-3'-phosphate
  modified_base 11: mod_base = OTHER; note = cytidine-3'-phosphate
  modified_base 12: mod_base = OTHER; note = adenosine-3'-phosphate
  modified_base 13: mod_base = OTHER; note = uridine-3'-phosphate
  modified_base 14: mod_base = OTHER; note = uridine-3'-phosphate
  modified_base 15: mod_base = OTHER; note = uridine-3'-phosphate
  modified_base 16: mod_base = OTHER; note = uridine-3'-phosphate
  modified_base 17: mod_base = OTHER; note = adenosine-3'-phosphate
  modified_base 18: mod_base = OTHER; note = adenosine-3'-phosphate
  modified_base 19: mod_base = OTHER; note = adenosine-3'-phosphate
  misc_feature 1..19: note = RNA
  misc_feature 20..21: note = DNA
aagtcggaaccattttaaatt

SEQ ID NO: 829 - DNA, 21 bp, synthetic construct
  source 1..21: mol_type = other DNA
  modified_base 1: mod_base = OTHER; note = uridine-3'-phosphate
  modified_base 2: mod_base = OTHER; note = uridine-3'-phosphate
  modified_base 3: mod_base = OTHER; note = adenosine-3'-phosphate
  modified_base 4: mod_base = OTHER; note = adenosine-3'-phosphate
  modified_base 5: mod_base = OTHER; note = adenosine-3'-phosphate
  modified_base 6: mod_base = OTHER; note = adenosine-3'-phosphate
  modified_base 7: mod_base = OTHER; note = uridine-3'-phosphate
  modified_base 8: mod_base = OTHER; note = guanosine-3'-phosphate
  modified_base 9: mod_base = OTHER; note = guanosine-3'-phosphate
  modified_base 10: mod_base = OTHER; note = uridine-3'-phosphate
  modified_base 11: mod_base = OTHER; note = uridine-3'-phosphate
  modified_base 12: mod_base = OTHER; note = cytidine-3'-phosphate
  modified_base 13: mod_base = OTHER; note = cytidine-3'-phosphate
  modified_base 14: mod_base = OTHER; note = guanosine-3'-phosphate
  modified_base 15: mod_base = OTHER; note = adenosine-3'-phosphate
  modified_base 16: mod_base = OTHER; note = cytidine-3'-phosphate
  modified_base 17: mod_base = OTHER; note = uridine-3'-phosphate
  modified_base 18: mod_base = OTHER; note = uridine-3'-phosphate
  modified_base 19: mod_base = OTHER; note = guanosine-3'-phosphate
  misc_feature 1..19: note = RNA
  misc_feature 20..21: note = DNA
ttaaaatggttccgacttgtt

SEQ ID NO: 830 - DNA, 21 bp, synthetic construct
  source 1..21: mol_type = other DNA
  modified_base 1: mod_base = OTHER; note = cytidine-3'-phosphate
  modified_base 2: mod_base = OTHER; note = adenosine-3'-phosphate
  modified_base 3: mod_base = OTHER; note = adenosine-3'-phosphate
  modified_base 4: mod_base = OTHER; note = guanosine-3'-phosphate
  modified_base 5: mod_base = OTHER; note = uridine-3'-phosphate
  modified_base 6: mod_base = OTHER; note = cytidine-3'-phosphate
  modified_base 7: mod_base = OTHER; note = guanosine-3'-phosphate
  modified_base 8: mod_base = OTHER; note = guanosine-3'-phosphate
  modified_base 9: mod_base = OTHER; note = adenosine-3'-phosphate
  modified_base 10: mod_base = OTHER; note = adenosine-3'-phosphate
  modified_base 11: mod_base = OTHER; note = cytidine-3'-phosphate
  modified_base 12: mod_base = OTHER; note = cytidine-3'-phosphate
  modified_base 13: mod_base = OTHER; note = adenosine-3'-phosphate
  modified_base 14: mod_base = OTHER; note = uridine-3'-phosphate
  modified_base 15: mod_base = OTHER; note = uridine-3'-phosphate
  modified_base 16: mod_base = OTHER; note = uridine-3'-phosphate
  modified_base 17: mod_base = OTHER; note = uridine-3'-phosphate
  modified_base 18: mod_base = OTHER; note = adenosine-3'-phosphate
  modified_base 19: mod_base = OTHER; note = adenosine-3'-phosphate
  misc_feature 1..19: note = RNA
  misc_feature 20..21: note = DNA
caagtcggaaccattttaatt

SEQ ID NO: 831 - DNA, 21 bp, synthetic construct
  source 1..21: mol_type = other DNA
  modified_base 1: mod_base = OTHER; note = uridine-3'-phosphate
  modified_base 2: mod_base = OTHER; note = adenosine-3'-phosphate
  modified_base 3: mod_base = OTHER; note = adenosine-3'-phosphate
  modified_base 4: mod_base = OTHER; note = adenosine-3'-phosphate
  modified_base 5: mod_base = OTHER; note = adenosine-3'-phosphate
  modified_base 6: mod_base = OTHER; note = uridine-3'-phosphate
  modified_base 7: mod_base = OTHER; note = guanosine-3'-phosphate
  modified_base 8: mod_base = OTHER; note = guanosine-3'-phosphate
  modified_base 9: mod_base = OTHER; note = uridine-3'-phosphate
  modified_base 10: mod_base = OTHER; note = uridine-3'-phosphate
  modified_base 11: mod_base = OTHER; note = cytidine-3'-phosphate
  modified_base 12: mod_base = OTHER; note = cytidine-3'-phosphate
  modified_base 13: mod_base = OTHER; note = guanosine-3'-phosphate
  modified_base 14: mod_base = OTHER; note = adenosine-3'-phosphate
  modified_base 15: mod_base = OTHER; note = cytidine-3'-phosphate
  modified_base 16: mod_base = OTHER; note = uridine-3'-phosphate
  modified_base 17: mod_base = OTHER; note = uridine-3'-phosphate
  modified_base 18: mod_base = OTHER; note = guanosine-3'-phosphate
  modified_base 19: mod_base = OTHER; note = uridine-3'-phosphate
  misc_feature 1..19: note = RNA
  misc_feature 20..21: note = DNA
taaaatggttccgacttgttt

SEQ ID NO: 832 - DNA, 21 bp, synthetic construct
  source 1..21: mol_type = other DNA
  modified_base 1: mod_base = OTHER; note = adenosine-3'-phosphate
  modified_base 2: mod_base = OTHER; note = cytidine-3'-phosphate
  modified_base 3: mod_base = OTHER; note = adenosine-3'-phosphate
  modified_base 4: mod_base = OTHER; note = adenosine-3'-phosphate
  modified_base 5: mod_base = OTHER; note = guanosine-3'-phosphate
  modified_base 6: mod_base = OTHER; note = uridine-3'-phosphate
  modified_base 7: mod_base = OTHER; note = cytidine-3'-phosphate
  modified_base 8: mod_base = OTHER; note = guanosine-3'-phosphate
  modified_base 9: mod_base = OTHER; note = guanosine-3'-phosphate
  modified_base 10: mod_base = OTHER; note = adenosine-3'-phosphate
  modified_base 11: mod_base = OTHER; note = adenosine-3'-phosphate
  modified_base 12: mod_base = OTHER; note = cytidine-3'-phosphate
  modified_base 13: mod_base = OTHER; note = cytidine-3'-phosphate
  modified_base 14: mod_base = OTHER; note = adenosine-3'-phosphate
  modified_base 15: mod_base = OTHER; note = uridine-3'-phosphate
  modified_base 16: mod_base = OTHER; note = uridine-3'-phosphate
  modified_base 17: mod_base = OTHER; note = uridine-3'-phosphate
  modified_base 18: mod_base = OTHER; note = uridine-3'-phosphate
  modified_base 19: mod_base = OTHER; note = adenosine-3'-phosphate
  misc_feature 1..19: note = RNA
  misc_feature 20..21: note = DNA
acaagtcggaaccattttatt

SEQ ID NO: 833 - DNA, 21 bp, synthetic construct
  source 1..21: mol_type = other DNA
  modified_base 1: mod_base = OTHER; note = adenosine-3'-phosphate
  modified_base 2: mod_base = OTHER; note = adenosine-3'-phosphate
  modified_base 3: mod_base = OTHER; note = adenosine-3'-phosphate
  modified_base 4: mod_base = OTHER; note = adenosine-3'-phosphate
  modified_base 5: mod_base = OTHER; note = uridine-3'-phosphate
  modified_base 6: mod_base = OTHER; note = guanosine-3'-phosphate
  modified_base 7: mod_base = OTHER; note = guanosine-3'-phosphate
  modified_base 8: mod_base = OTHER; note = uridine-3'-phosphate
  modified_base 9: mod_base = OTHER; note = uridine-3'-phosphate
  modified_base 10: mod_base = OTHER; note = cytidine-3'-phosphate
  modified_base 11: mod_base = OTHER; note = cytidine-3'-phosphate
  modified_base 12: mod_base = OTHER; note = guanosine-3'-phosphate
  modified_base 13: mod_base = OTHER; note = adenosine-3'-phosphate
  modified_base 14: mod_base = OTHER; note = cytidine-3'-phosphate
  modified_base 15: mod_base = OTHER; note = uridine-3'-phosphate
  modified_base 16: mod_base = OTHER; note = uridine-3'-phosphate
  modified_base 17: mod_base = OTHER; note = guanosine-3'-phosphate
  modified_base 18: mod_base = OTHER; note = uridine-3'-phosphate
  modified_base 19: mod_base = OTHER; note = cytidine-3'-phosphate
  misc_feature 1..19: note = RNA
  misc_feature 20..21: note = DNA
aaaatggttccgacttgtctt

SEQ ID NO: 834 - DNA, 21 bp, synthetic construct
  source 1..21: mol_type = other DNA
  modified_base 1: mod_base = OTHER; note = guanosine-3'-phosphate
  modified_base 2: mod_base = OTHER; note = adenosine-3'-phosphate
  modified_base 3: mod_base = OTHER; note = cytidine-3'-phosphate
  modified_base 4: mod_base = OTHER; note = adenosine-3'-phosphate
  modified_base 5: mod_base = OTHER; note = adenosine-3'-phosphate
  modified_base 6: mod_base = OTHER; note = guanosine-3'-phosphate
  modified_base 7: mod_base = OTHER; note = uridine-3'-phosphate
  modified_base 8: mod_base = OTHER; note = cytidine-3'-phosphate
  modified_base 9: mod_base = OTHER; note = guanosine-3'-phosphate
  modified_base 10: mod_base = OTHER; note = guanosine-3'-phosphate
  modified_base 11: mod_base = OTHER; note = adenosine-3'-phosphate
  modified_base 12: mod_base = OTHER; note = adenosine-3'-phosphate
  modified_base 13: mod_base = OTHER; note = cytidine-3'-phosphate
  modified_base 14: mod_base = OTHER; note = cytidine-3'-phosphate
  modified_base 15: mod_base = OTHER; note = adenosine-3'-phosphate
  modified_base 16: mod_base = OTHER; note = uridine-3'-phosphate
  modified_base 17: mod_base = OTHER; note = uridine-3'-phosphate
  modified_base 18: mod_base = OTHER; note = uridine-3'-phosphate
  modified_base 19: mod_base = OTHER; note = uridine-3'-phosphate
  misc_feature 1..19: note = RNA
  misc_feature 20..21: note = DNA
gacaagtcggaaccatttttt

SEQ ID NO: 835 - DNA, 21 bp, synthetic construct
  source 1..21: mol_type = other DNA
  modified_base 1: mod_base = OTHER; note = adenosine-3'-phosphate
  modified_base 2: mod_base = OTHER; note = adenosine-3'-phosphate
  modified_base 3: mod_base = OTHER; note = adenosine-3'-phosphate
  modified_base 4: mod_base = OTHER; note = uridine-3'-phosphate
  modified_base 5: mod_base = OTHER; note = guanosine-3'-phosphate
  modified_base 6: mod_base = OTHER; note = guanosine-3'-phosphate
  modified_base 7: mod_base = OTHER; note = uridine-3'-phosphate
  modified_base 8: mod_base = OTHER; note = uridine-3'-phosphate
  modified_base 9: mod_base = OTHER; note = cytidine-3'-phosphate
  modified_base 10: mod_base = OTHER; note = cytidine-3'-phosphate
  modified_base 11: mod_base = OTHER; note = guanosine-3'-phosphate
  modified_base 12: mod_base = OTHER; note = adenosine-3'-phosphate
  modified_base 13: mod_base = OTHER; note = cytidine-3'-phosphate
  modified_base 14: mod_base = OTHER; note = uridine-3'-phosphate
  modified_base 15: mod_base = OTHER; note = uridine-3'-phosphate
  modified_base 16: mod_base = OTHER; note = guanosine-3'-phosphate
  modified_base 17: mod_base = OTHER; note = uridine-3'-phosphate
  modified_base 18: mod_base = OTHER; note = cytidine-3'-phosphate
  modified_base 19: mod_base = OTHER; note = cytidine-3'-phosphate
  misc_feature 1..19: note = RNA
  misc_feature 20..21: note = DNA
aaatggttccgacttgtcctt

SEQ ID NO: 836 - DNA, 21 bp, synthetic construct
  source 1..21: mol_type = other DNA
  modified_base 1: mod_base = OTHER; note = guanosine-3'-phosphate
  modified_base 2: mod_base = OTHER; note = guanosine-3'-phosphate
  modified_base 3: mod_base = OTHER; note = adenosine-3'-phosphate
  modified_base 4: mod_base = OTHER; note = cytidine-3'-phosphate
  modified_base 5: mod_base = OTHER; note = adenosine-3'-phosphate
  modified_base 6: mod_base = OTHER; note = adenosine-3'-phosphate
  modified_base 7: mod_base = OTHER; note = guanosine-3'-phosphate
  modified_base 8: mod_base = OTHER; note = uridine-3'-phosphate
  modified_base 9: mod_base = OTHER; note = cytidine-3'-phosphate
  modified_base 10: mod_base = OTHER; note = guanosine-3'-phosphate
  modified_base 11: mod_base = OTHER; note = guanosine-3'-phosphate
  modified_base 12: mod_base = OTHER; note = adenosine-3'-phosphate
  modified_base 13: mod_base = OTHER; note = adenosine-3'-phosphate
  modified_base 14: mod_base = OTHER; note = cytidine-3'-phosphate
  modified_base 15: mod_base = OTHER; note = cytidine-3'-phosphate
  modified_base 16: mod_base = OTHER; note = adenosine-3'-phosphate
  modified_base 17: mod_base = OTHER; note = uridine-3'-phosphate
  modified_base 18: mod_base = OTHER; note = uridine-3'-phosphate
  modified_base 19: mod_base = OTHER; note = uridine-3'-phosphate
  misc_feature 1..19: note = RNA
  misc_feature 20..21: note = DNA
ggacaagtcggaaccattttt

SEQ ID NO: 837 - DNA, 21 bp, synthetic construct
  source 1..21: mol_type = other DNA
  modified_base 1: mod_base = OTHER; note = adenosine-3'-phosphate
  modified_base 2: mod_base = OTHER; note = adenosine-3'-phosphate
  modified_base 3: mod_base = OTHER; note = uridine-3'-phosphate
  modified_base 4: mod_base = OTHER; note = guanosine-3'-phosphate
  modified_base 5: mod_base = OTHER; note = guanosine-3'-phosphate
  modified_base 6: mod_base = OTHER; note = uridine-3'-phosphate
  modified_base 7: mod_base = OTHER; note = uridine-3'-phosphate
  modified_base 8: mod_base = OTHER; note = cytidine-3'-phosphate
  modified_base 9: mod_base = OTHER; note = cytidine-3'-phosphate
  modified_base 10: mod_base = OTHER; note = guanosine-3'-phosphate
  modified_base 11: mod_base = OTHER; note = adenosine-3'-phosphate
  modified_base 12: mod_base = OTHER; note = cytidine-3'-phosphate
  modified_base 13: mod_base = OTHER; note = uridine-3'-phosphate
  modified_base 14: mod_base = OTHER; note = uridine-3'-phosphate
  modified_base 15: mod_base = OTHER; note = guanosine-3'-phosphate
  modified_base 16: mod_base = OTHER; note = uridine-3'-phosphate
  modified_base 17: mod_base = OTHER; note = cytidine-3'-phosphate
  modified_base 18: mod_base = OTHER; note = cytidine-3'-phosphate
  modified_base 19: mod_base = OTHER; note = cytidine-3'-phosphate
  misc_feature 1..19: note = RNA
  misc_feature 20..21: note = DNA
aatggttccgacttgtccctt

SEQ ID NO: 838 - DNA, 21 bp, synthetic construct
  source 1..21: mol_type = other DNA
  modified_base 1: mod_base = OTHER; note = guanosine-3'-phosphate
  modified_base 2: mod_base = OTHER; note = guanosine-3'-phosphate
  modified_base 3: mod_base = OTHER; note = guanosine-3'-phosphate
  modified_base 4: mod_base = OTHER; note = adenosine-3'-phosphate
  modified_base 5: mod_base = OTHER; note = cytidine-3'-phosphate
  modified_base 6: mod_base = OTHER; note = adenosine-3'-phosphate
  modified_base 7: mod_base = OTHER; note = adenosine-3'-phosphate
  modified_base 8: mod_base = OTHER; note = guanosine-3'-phosphate
  modified_base 9: mod_base = OTHER; note = uridine-3'-phosphate
  modified_base 10: mod_base = OTHER; note = cytidine-3'-phosphate
  modified_base 11: mod_base = OTHER; note = guanosine-3'-phosphate
  modified_base 12: mod_base = OTHER; note = guanosine-3'-phosphate
  modified_base 13: mod_base = OTHER; note = adenosine-3'-phosphate
  modified_base 14: mod_base = OTHER; note = adenosine-3'-phosphate
  modified_base 15: mod_base = OTHER; note = cytidine-3'-phosphate
  modified_base 16: mod_base = OTHER; note = cytidine-3'-phosphate
  modified_base 17: mod_base = OTHER; note = adenosine-3'-phosphate
  modified_base 18: mod_base = OTHER; note = uridine-3'-phosphate
  modified_base 19: mod_base = OTHER; note = uridine-3'-phosphate
  misc_feature 1..19: note = RNA
  misc_feature 20..21: note = DNA
gggacaagtcggaaccatttt

SEQ ID NO: 839 - DNA, 21 bp, synthetic construct
  source 1..21: mol_type = other DNA
  modified_base 1: mod_base = OTHER; note = guanosine-3'-phosphate
  modified_base 2: mod_base = OTHER; note = guanosine-3'-phosphate
  modified_base 3: mod_base = OTHER; note = uridine-3'-phosphate
  modified_base 4: mod_base = OTHER; note = uridine-3'-phosphate
  modified_base 5: mod_base = OTHER; note = cytidine-3'-phosphate
  modified_base 6: mod_base = OTHER; note = cytidine-3'-phosphate
  modified_base 7: mod_base = OTHER; note = guanosine-3'-phosphate
  modified_base 8: mod_base = OTHER; note = adenosine-3'-phosphate
  modified_base 9: mod_base = OTHER; note = cytidine-3'-phosphate
  modified_base 10: mod_base = OTHER; note = uridine-3'-phosphate
  modified_base 11: mod_base = OTHER; note = uridine-3'-phosphate
  modified_base 12: mod_base = OTHER; note = guanosine-3'-phosphate
  modified_base 13: mod_base = OTHER; note = uridine-3'-phosphate
  modified_base 14: mod_base = OTHER; note = cytidine-3'-phosphate
  modified_base 15: mod_base = OTHER; note = cytidine-3'-phosphate
  modified_base 16: mod_base = OTHER; note = cytidine-3'-phosphate
  modified_base 17: mod_base = OTHER; note = uridine-3'-phosphate
  modified_base 18: mod_base = OTHER; note = cytidine-3'-phosphate
  modified_base 19: mod_base = OTHER; note = uridine-3'-phosphate
  misc_feature 1..19: note = RNA
  misc_feature 20..21: note = DNA
ggttccgacttgtccctcttt

SEQ ID NO: 840 - DNA, 21 bp, synthetic construct
  source 1..21: mol_type = other DNA
  modified_base 1: mod_base = OTHER; note = adenosine-3'-phosphate
  modified_base 2: mod_base = OTHER; note = guanosine-3'-phosphate
  modified_base 3: mod_base = OTHER; note = adenosine-3'-phosphate
  modified_base 4: mod_base = OTHER; note = guanosine-3'-phosphate
  modified_base 5: mod_base = OTHER; note = guanosine-3'-phosphate
  modified_base 6: mod_base = OTHER; note = guanosine-3'-phosphate
  modified_base 7: mod_base = OTHER; note = adenosine-3'-phosphate
  modified_base 8: mod_base = OTHER; note = cytidine-3'-phosphate
  modified_base 9: mod_base = OTHER; note = adenosine-3'-phosphate
  modified_base 10: mod_base = OTHER; note = adenosine-3'-phosphate
  modified_base 11: mod_base = OTHER; note = guanosine-3'-phosphate
  modified_base 12: mod_base = OTHER; note = uridine-3'-phosphate
  modified_base 13: mod_base = OTHER; note = cytidine-3'-phosphate
  modified_base 14: mod_base = OTHER; note = guanosine-3'-phosphate
  modified_base 15: mod_base = OTHER; note = guanosine-3'-phosphate
  modified_base 16: mod_base = OTHER; note = adenosine-3'-phosphate
  modified_base 17: mod_base = OTHER; note = adenosine-3'-phosphate
  modified_base 18: mod_base = OTHER; note = cytidine-3'-phosphate
  modified_base 19: mod_base = OTHER; note = cytidine-3'-phosphate
  misc_feature 1..19: note = RNA
  misc_feature 20..21: note = DNA
agagggacaagtcggaacctt

SEQ ID NO: 841 - DNA, 21 bp, synthetic construct
  source 1..21: mol_type = other DNA
  modified_base 1: mod_base = OTHER; note = cytidine-3'-phosphate
  modified_base 2: mod_base = OTHER; note = uridine-3'-phosphate
  modified_base 3: mod_base = OTHER; note = cytidine-3'-phosphate
  modified_base 4: mod_base = OTHER; note = cytidine-3'-phosphate
  modified_base 5: mod_base = OTHER; note = adenosine-3'-phosphate
  modified_base 6: mod_base = OTHER; note = uridine-3'-phosphate
  modified_base 7: mod_base = OTHER; note = guanosine-3'-phosphate
  modified_base 8: mod_base = OTHER; note = guanosine-3'-phosphate
  modified_base 9: mod_base = OTHER; note = cytidine-3'-phosphate
  modified_base 10: mod_base = OTHER; note = cytidine-3'-phosphate
  modified_base 11: mod_base = OTHER; note = uridine-3'-phosphate
  modified_base 12: mod_base = OTHER; note = guanosine-3'-phosphate
  modified_base 13: mod_base = OTHER; note = guanosine-3'-phosphate
  modified_base 14: mod_base = OTHER; note = cytidine-3'-phosphate
  modified_base 15: mod_base = OTHER; note = adenosine-3'-phosphate
  modified_base 16: mod_base = OTHER; note = cytidine-3'-phosphate
  modified_base 17: mod_base = OTHER; note = guanosine-3'-phosphate
  modified_base 18: mod_base = OTHER; note = adenosine-3'-phosphate
  modified_base 19: mod_base = OTHER; note = guanosine-3'-phosphate
  misc_feature 1..19: note = RNA
  misc_feature 20..21: note = DNA
ctccatggcctggcacgagtt

SEQ ID NO: 842 - DNA, 21 bp, synthetic construct
  source 1..21: mol_type = other DNA
  modified_base 1: mod_base = OTHER; note = cytidine-3'-phosphate
  modified_base 2: mod_base = OTHER; note = uridine-3'-phosphate
  modified_base 3: mod_base = OTHER; note = cytidine-3'-phosphate
  modified_base 4: mod_base = OTHER; note = guanosine-3'-phosphate
  modified_base 5: mod_base = OTHER; note = uridine-3'-phosphate
  modified_base 6: mod_base = OTHER; note = guanosine-3'-phosphate
  modified_base 7: mod_base = OTHER; note = cytidine-3'-phosphate
  modified_base 8: mod_base = OTHER; note = cytidine-3'-phosphate
  modified_base 9: mod_base = OTHER; note = adenosine-3'-phosphate
  modified_base 10: mod_base = OTHER; note = guanosine-3'-phosphate
  modified_base 11: mod_base = OTHER; note = guanosine-3'-phosphate
  modified_base 12: mod_base = OTHER; note = cytidine-3'-phosphate
  modified_base 13: mod_base = OTHER; note = cytidine-3'-phosphate
  modified_base 14: mod_base = OTHER; note = adenosine-3'-phosphate
  modified_base 15: mod_base = OTHER; note = uridine-3'-phosphate
  modified_base 16: mod_base = OTHER; note = guanosine-3'-phosphate
  modified_base 17: mod_base = OTHER; note = guanosine-3'-phosphate
  modified_base 18: mod_base = OTHER; note = adenosine-3'-phosphate
  modified_base 19: mod_base = OTHER; note = guanosine-3'-phosphate
  misc_feature 1..19: note = RNA
  misc_feature 20..21: note = DNA
ctcgtgccaggccatggagtt

SEQ ID NO: 843 - DNA, 21 bp, synthetic construct
  source 1..21: mol_type = other DNA
  modified_base 1: mod_base = OTHER; note = cytidine-3'-phosphate
  modified_base 2: mod_base = OTHER; note = cytidine-3'-phosphate
  modified_base 3: mod_base = OTHER; note = adenosine-3'-phosphate
  modified_base 4: mod_base = OTHER; note = uridine-3'-phosphate
  modified_base 5: mod_base = OTHER; note = guanosine-3'-phosphate
  modified_base 6: mod_base = OTHER; note = guanosine-3'-phosphate
  modified_base 7: mod_base = OTHER; note = cytidine-3'-phosphate
  modified_base 8: mod_base = OTHER; note = cytidine-3'-phosphate
  modified_base 9: mod_base = OTHER; note = uridine-3'-phosphate
  modified_base 10: mod_base = OTHER; note = guanosine-3'-phosphate
  modified_base 11: mod_base = OTHER; note = guanosine-3'-phosphate
  modified_base 12: mod_base = OTHER; note = cytidine-3'-phosphate
  modified_base 13: mod_base = OTHER; note = adenosine-3'-phosphate
  modified_base 14: mod_base = OTHER; note = cytidine-3'-phosphate
  modified_base 15: mod_base = OTHER; note = guanosine-3'-phosphate
  modified_base 16: mod_base = OTHER; note = adenosine-3'-phosphate
  modified_base 17: mod_base = OTHER; note = guanosine-3'-phosphate
  modified_base 18: mod_base = OTHER; note = guanosine-3'-phosphate
  modified_base 19: mod_base = OTHER; note = guanosine-3'-phosphate
  misc_feature 1..19: note = RNA
  misc_feature 20..21: note = DNA
ccatggcctggcacgagggtt

SEQ ID NO: 844 - DNA, 21 bp, synthetic construct
  source 1..21: mol_type = other DNA
  modified_base 1: mod_base = OTHER; note = cytidine-3'-phosphate
  modified_base 2: mod_base = OTHER; note = cytidine-3'-phosphate
  modified_base 3: mod_base = OTHER; note = cytidine-3'-phosphate
  modified_base 4: mod_base = OTHER; note = uridine-3'-phosphate
  modified_base 5: mod_base = OTHER; note = cytidine-3'-phosphate
  modified_base 6: mod_base = OTHER; note = guanosine-3'-phosphate
  modified_base 7: mod_base = OTHER; note = uridine-3'-phosphate
  modified_base 8: mod_base = OTHER; note = guanosine-3'-phosphate
  modified_base 9: mod_base = OTHER; note = cytidine-3'-phosphate
  modified_base 10: mod_base = OTHER; note = cytidine-3'-phosphate
  modified_base 11: mod_base = OTHER; note = adenosine-3'-phosphate
  modified_base 12: mod_base = OTHER; note = guanosine-3'-phosphate
  modified_base 13: mod_base = OTHER; note = guanosine-3'-phosphate
  modified_base 14: mod_base = OTHER; note = cytidine-3'-phosphate
  modified_base 15: mod_base = OTHER; note = cytidine-3'-phosphate
  modified_base 16: mod_base = OTHER; note = adenosine-3'-phosphate
  modified_base 17: mod_base = OTHER; note = uridine-3'-phosphate
  modified_base 18: mod_base = OTHER; note = guanosine-3'-phosphate
  modified_base 19: mod_base = OTHER; note = guanosine-3'-phosphate
  misc_feature 1..19: note = RNA
  misc_feature 20..21: note = DNA
ccctcgtgccaggccatggtt

SEQ ID NO: 845 - DNA, 21 bp, synthetic construct
  source 1..21: mol_type = other DNA
  modified_base 1: mod_base = OTHER; note = guanosine-3'-phosphate
  modified_base 2: mod_base = OTHER; note = adenosine-3'-phosphate
  modified_base 3: mod_base = OTHER; note = adenosine-3'-phosphate
  modified_base 4: mod_base = OTHER; note = cytidine-3'-phosphate
  modified_base 5: mod_base = OTHER; note = uridine-3'-phosphate
  modified_base 6: mod_base = OTHER; note = cytidine-3'-phosphate
  modified_base 7: mod_base = OTHER; note = adenosine-3'-phosphate
  modified_base 8: mod_base = OTHER; note = cytidine-3'-phosphate
  modified_base 9: mod_base = OTHER; note = uridine-3'-phosphate
  modified_base 10: mod_base = OTHER; note = cytidine-3'-phosphate
  modified_base 11: mod_base = OTHER; note = adenosine-3'-phosphate
  modified_base 12: mod_base = OTHER; note = cytidine-3'-phosphate
  modified_base 13: mod_base = OTHER; note = uridine-3'-phosphate
  modified_base 14: mod_base = OTHER; note = cytidine-3'-phosphate
  modified_base 15: mod_base = OTHER; note = uridine-3'-phosphate
  modified_base 16: mod_base = OTHER; note = guanosine-3'-phosphate
  modified_base 17: mod_base = OTHER; note = guanosine-3'-phosphate
  modified_base 18: mod_base = OTHER; note = guanosine-3'-phosphate
  modified_base 19: mod_base = OTHER; note = uridine-3'-phosphate
  misc_feature 1..19: note = RNA
  misc_feature 20..21: note = DNA
gaactcactcactctgggttt

SEQ ID NO: 846 - DNA, 21 bp, synthetic construct
  source 1..21: mol_type = other DNA
  modified_base 1: mod_base = OTHER; note = adenosine-3'-phosphate
  modified_base 2: mod_base = OTHER; note = cytidine-3'-phosphate
  modified_base 3: mod_base = OTHER; note = cytidine-3'-phosphate
  modified_base 4: mod_base = OTHER; note = cytidine-3'-phosphate
  modified_base 5: mod_base = OTHER; note = adenosine-3'-phosphate
  modified_base 6: mod_base = OTHER; note = guanosine-3'-phosphate
  modified_base 7: mod_base = OTHER; note = adenosine-3'-phosphate
  modified_base 8: mod_base = OTHER; note = guanosine-3'-phosphate
  modified_base 9: mod_base = OTHER; note = uridine-3'-phosphate
  modified_base 10: mod_base = OTHER; note = guanosine-3'-phosphate
  modified_base 11: mod_base = OTHER; note = adenosine-3'-phosphate
  modified_base 12: mod_base = OTHER; note = guanosine-3'-phosphate
  modified_base 13: mod_base = OTHER; note = uridine-3'-phosphate
  modified_base 14: mod_base = OTHER; note = guanosine-3'-phosphate
  modified_base 15: mod_base = OTHER; note = adenosine-3'-phosphate
  modified_base 16: mod_base = OTHER; note = guanosine-3'-phosphate
  modified_base 17: mod_base = OTHER; note = uridine-3'-phosphate
  modified_base 18: mod_base = OTHER; note = uridine-3'-phosphate
  modified_base 19: mod_base = OTHER; note = cytidine-3'-phosphate
  misc_feature 1..19: note = RNA
  misc_feature 20..21: note = DNA
acccagagtgagtgagttctt

SEQ ID NO: 847 - DNA, 21 bp, synthetic construct
  source 1..21: mol_type = other DNA
  modified_base 1: mod_base = OTHER; note = uridine-3'-phosphate
  modified_base 2: mod_base = OTHER; note = cytidine-3'-phosphate
  modified_base 3: mod_base = OTHER; note = adenosine-3'-phosphate
  modified_base 4: mod_base = OTHER; note = cytidine-3'-phosphate
  modified_base 5: mod_base = OTHER; note = uridine-3'-phosphate
  modified_base 6: mod_base = OTHER; note = cytidine-3'-phosphate
  modified_base 7: mod_base = OTHER; note = adenosine-3'-phosphate
  modified_base 8: mod_base = OTHER; note = cytidine-3'-phosphate
  modified_base 9: mod_base = OTHER; note = uridine-3'-phosphate
  modified_base 10: mod_base = OTHER; note = cytidine-3'-phosphate
  modified_base 11: mod_base = OTHER; note = uridine-3'-phosphate
  modified_base 12: mod_base = OTHER; note = guanosine-3'-phosphate
  modified_base 13: mod_base = OTHER; note = guanosine-3'-phosphate
  modified_base 14: mod_base = OTHER; note = guanosine-3'-phosphate
  modified_base 15: mod_base = OTHER; note = uridine-3'-phosphate
  modified_base 16: mod_base = OTHER; note = guanosine-3'-phosphate
  modified_base 17: mod_base = OTHER; note = cytidine-3'-phosphate
  modified_base 18: mod_base = OTHER; note = cytidine-3'-phosphate
  modified_base 19: mod_base = OTHER; note = uridine-3'-phosphate
  misc_feature 1..19: note = RNA
  misc_feature 20..21: note = DNA
tcactcactctgggtgccttt

SEQ ID NO: 848 - DNA, 21 bp, synthetic construct
  source 1..21: mol_type = other DNA
  modified_base 1: mod_base = OTHER; note = adenosine-3'-phosphate
  modified_base 2: mod_base = OTHER; note = guanosine-3'-phosphate
  modified_base 3: mod_base = OTHER; note = guanosine-3'-phosphate
  modified_base 4: mod_base = OTHER; note = cytidine-3'-phosphate
  modified_base 5: mod_base = OTHER; note = adenosine-3'-phosphate
  modified_base 6: mod_base = OTHER; note = cytidine-3'-phosphate
  modified_base 7: mod_base = OTHER; note = cytidine-3'-phosphate
  modified_base 8: mod_base = OTHER; note = cytidine-3'-phosphate
  modified_base 9: mod_base = OTHER; note = adenosine-3'-phosphate
  modified_base 10: mod_base = OTHER; note = guanosine-3'-phosphate
  modified_base 11: mod_base = OTHER; note = adenosine-3'-phosphate
  modified_base 12: mod_base = OTHER; note = guanosine-3'-phosphate
  modified_base 13: mod_base = OTHER; note = uridine-3'-phosphate
  modified_base 14: mod_base = OTHER; note = guanosine-3'-phosphate
  modified_base 15: mod_base = OTHER; note = adenosine-3'-phosphate
  modified_base 16: mod_base = OTHER; note = guanosine-3'-phosphate
  modified_base 17: mod_base = OTHER; note = uridine-3'-phosphate
  modified_base 18: mod_base = OTHER; note = guanosine-3'-phosphate
  modified_base 19: mod_base = OTHER; note = adenosine-3'-phosphate
  misc_feature 1..19: note = RNA
  misc_feature 20..21: note = DNA
aggcacccagagtgagtgatt

SEQ ID NO: 849 - DNA, 21 bp, synthetic construct
  source 1..21: mol_type = other DNA
  modified_base 1: mod_base = OTHER; note = uridine-3'-phosphate
  modified_base 2: mod_base = OTHER; note = uridine-3'-phosphate
  modified_base 3: mod_base = OTHER; note = uridine-3'-phosphate
  modified_base 4: mod_base = OTHER; note = cytidine-3'-phosphate
  modified_base 5: mod_base = OTHER; note = adenosine-3'-phosphate
  modified_base 6: mod_base = OTHER; note = cytidine-3'-phosphate
  modified_base 7: mod_base = OTHER; note = cytidine-3'-phosphate
  modified_base 8: mod_base = OTHER; note = adenosine-3'-phosphate
  modified_base 9: mod_base = OTHER; note = uridine-3'-phosphate
  modified_base 10: mod_base = OTHER; note = uridine-3'-phosphate
  modified_base 11: mod_base = OTHER; note = cytidine-3'-phosphate
  modified_base 12: mod_base = OTHER; note = adenosine-3'-phosphate
  modified_base 13: mod_base = OTHER; note = adenosine-3'-phosphate
  modified_base 14: mod_base = OTHER; note = adenosine-3'-phosphate
  modified_base 15: mod_base = OTHER; note = cytidine-3'-phosphate
  modified_base 16: mod_base = OTHER; note = adenosine-3'-phosphate
  modified_base 17: mod_base = OTHER; note = guanosine-3'-phosphate
  modified_base 18: mod_base = OTHER; note = guanosine-3'-phosphate
  modified_base 19: mod_base = OTHER; note = uridine-3'-phosphate
  misc_feature 1..19: note = RNA
  misc_feature 20..21: note = DNA
tttcaccattcaaacaggttt

SEQ ID NO: 850 - DNA, 21 bp, synthetic construct
  source 1..21: mol_type = other DNA
  modified_base 1: mod_base = OTHER; note = adenosine-3'-phosphate
  modified_base 2: mod_base = OTHER; note = cytidine-3'-phosphate
  modified_base 3: mod_base = OTHER; note = cytidine-3'-phosphate
  modified_base 4: mod_base = OTHER; note = uridine-3'-phosphate
  modified_base 5: mod_base = OTHER; note = guanosine-3'-phosphate
  modified_base 6: mod_base = OTHER; note = uridine-3'-phosphate
  modified_base 7: mod_base = OTHER; note = uridine-3'-phosphate
  modified_base 8: mod_base = OTHER; note = uridine-3'-phosphate
  modified_base 9: mod_base = OTHER; note = guanosine-3'-phosphate
  modified_base 10: mod_base = OTHER; note = adenosine-3'-phosphate
  modified_base 11: mod_base = OTHER; note = adenosine-3'-phosphate
  modified_base 12: mod_base = OTHER; note = uridine-3'-phosphate
  modified_base 13: mod_base = OTHER; note = guanosine-3'-phosphate
  modified_base 14: mod_base = OTHER; note = guanosine-3'-phosphate
  modified_base 15: mod_base = OTHER; note = uridine-3'-phosphate
  modified_base 16: mod_base = OTHER; note = guanosine-3'-phosphate
  modified_base 17: mod_base = OTHER; note = adenosine-3'-phosphate
  modified_base 18: mod_base = OTHER; note = adenosine-3'-phosphate
  modified_base 19: mod_base = OTHER; note = adenosine-3'-phosphate
  misc_feature 1..19: note = RNA
  misc_feature 20..21: note = DNA
acctgtttgaatggtgaaatt

SEQ ID NO: 851 - DNA, 21 bp, synthetic construct
  source 1..21: mol_type = other DNA
  modified_base 1: mod_base = OTHER; note = cytidine-3'-phosphate
  modified_base 2: mod_base = OTHER; note = adenosine-3'-phosphate
  modified_base 3: mod_base = OTHER; note = uridine-3'-phosphate
  modified_base 4: mod_base = OTHER; note = uridine-3'-phosphate
  modified_base 5: mod_base = OTHER; note = cytidine-3'-phosphate
  modified_base 6: mod_base = OTHER; note = adenosine-3'-phosphate
  modified_base 7: mod_base = OTHER; note = adenosine-3'-phosphate
  modified_base 8: mod_base = OTHER; note = adenosine-3'-phosphate
  modified_base 9: mod_base = OTHER; note = cytidine-3'-phosphate
  modified_base 10: mod_base = OTHER; note = adenosine-3'-phosphate
  modified_base 11: mod_base = OTHER; note = guanosine-3'-phosphate
  modified_base 12: mod_base = OTHER; note = guanosine-3'-phosphate
  modified_base 13: mod_base = OTHER; note = uridine-3'-phosphate
  modified_base 14: mod_base = OTHER; note = cytidine-3'-phosphate
  modified_base 15: mod_base = OTHER; note = guanosine-3'-phosphate
  modified_base 16: mod_base = OTHER; note = adenosine-3'-phosphate
  modified_base 17: mod_base = OTHER; note = guanosine-3'-phosphate
  modified_base 18: mod_base = OTHER; note = cytidine-3'-phosphate
  modified_base 19: mod_base = OTHER; note = uridine-3'-phosphate
  misc_feature 1..19: note = RNA
  misc_feature 20..21: note = DNA
cattcaaacaggtcgagcttt

SEQ ID NO: 852 - DNA, 21 bp, synthetic construct
  source 1..21: mol_type = other DNA
  modified_base 1: mod_base = OTHER; note = adenosine-3'-phosphate
  modified_base 2: mod_base = OTHER; note = guanosine-3'-phosphate
  modified_base 3: mod_base = OTHER; note = cytidine-3'-phosphate
  modified_base 4: mod_base = OTHER; note = uridine-3'-phosphate
  modified_base 5: mod_base = OTHER; note = cytidine-3'-phosphate
  modified_base 6: mod_base = OTHER; note = guanosine-3'-phosphate
  modified_base 7: mod_base = OTHER; note = adenosine-3'-phosphate
  modified_base 8: mod_base = OTHER; note = cytidine-3'-phosphate
  modified_base 9: mod_base = OTHER; note = cytidine-3'-phosphate
  modified_base 10: mod_base = OTHER; note = uridine-3'-phosphate
  modified_base 11: mod_base = OTHER; note = guanosine-3'-phosphate
  modified_base 12: mod_base = OTHER; note = uridine-3'-phosphate
  modified_base 13: mod_base = OTHER; note = uridine-3'-phosphate
  modified_base 14: mod_base = OTHER; note = uridine-3'-phosphate
  modified_base 15: mod_base = OTHER; note = guanosine-3'-phosphate
  modified_base 16: mod_base = OTHER; note = adenosine-3'-phosphate
  modified_base 17: mod_base = OTHER; note = adenosine-3'-phosphate
  modified_base 18: mod_base = OTHER; note = uridine-3'-phosphate
  modified_base 19: mod_base = OTHER; note = guanosine-3'-phosphate
  misc_feature 1..19: note = RNA
  misc_feature 20..21: note = DNA
agctcgacctgtttgaatgtt

SEQ ID NO: 853 - DNA, 21 bp, synthetic construct
  source 1..21: mol_type = other DNA
  modified_base 1: mod_base = OTHER; note = adenosine-3'-phosphate
  modified_base 2: mod_base = OTHER; note = uridine-3'-phosphate
  modified_base 3: mod_base = OTHER; note = uridine-3'-phosphate
  modified_base 4: mod_base = OTHER; note = cytidine-3'-phosphate
  modified_base 5: mod_base = OTHER; note = adenosine-3'-phosphate
  modified_base 6: mod_base = OTHER; note = adenosine-3'-phosphate
  modified_base 7: mod_base = OTHER; note = adenosine-3'-phosphate
  modified_base 8: mod_base = OTHER; note = cytidine-3'-phosphate
  modified_base 9: mod_base = OTHER; note = adenosine-3'-phosphate
  modified_base 10: mod_base = OTHER; note = guanosine-3'-phosphate
  modified_base 11: mod_base = OTHER; note = guanosine-3'-phosphate
  modified_base 12: mod_base = OTHER; note = uridine-3'-phosphate
  modified_base 13: mod_base = OTHER; note = cytidine-3'-phosphate
  modified_base 14: mod_base = OTHER; note = guanosine-3'-phosphate
  modified_base 15: mod_base = OTHER; note = adenosine-3'-phosphate
  modified_base 16: mod_base = OTHER; note = guanosine-3'-phosphate
  modified_base 17: mod_base = OTHER; note = cytidine-3'-phosphate
  modified_base 18: mod_base = OTHER; note = uridine-3'-phosphate
  modified_base 19: mod_base = OTHER; note = guanosine-3'-phosphate
  misc_feature 1..19: note = RNA
  misc_feature 20..21: note = DNA
attcaaacaggtcgagctgtt

SEQ ID NO: 854 - DNA, 21 bp, synthetic construct
  source 1..21: mol_type = other DNA
  modified_base 1: mod_base = OTHER; note = cytidine-3'-phosphate
  modified_base 2: mod_base = OTHER; note = adenosine-3'-phosphate
  modified_base 3: mod_base = OTHER; note = guanosine-3'-phosphate
  modified_base 4: mod_base = OTHER; note = cytidine-3'-phosphate
  modified_base 5: mod_base = OTHER; note = uridine-3'-phosphate
  modified_base 6: mod_base = OTHER; note = cytidine-3'-phosphate
  modified_base 7: mod_base = OTHER; note = guanosine-3'-phosphate
  modified_base 8: mod_base = OTHER; note = adenosine-3'-phosphate
  modified_base 9: mod_base = OTHER; note = cytidine-3'-phosphate
  modified_base 10: mod_base = OTHER; note = cytidine-3'-phosphate
  modified_base 11: mod_base = OTHER; note = uridine-3'-phosphate
  modified_base 12: mod_base = OTHER; note = guanosine-3'-phosphate
  modified_base 13: mod_base = OTHER; note = uridine-3'-phosphate
  modified_base 14: mod_base = OTHER; note = uridine-3'-phosphate
  modified_base 15: mod_base = OTHER; note = uridine-3'-phosphate
  modified_base 16: mod_base = OTHER; note = guanosine-3'-phosphate
  modified_base 17: mod_base = OTHER; note = adenosine-3'-phosphate
  modified_base 18: mod_base = OTHER; note = adenosine-3'-phosphate
  modified_base 19: mod_base = OTHER; note = uridine-3'-phosphate
  misc_feature 1..19: note = RNA
  misc_feature 20..21: note = DNA
cagctcgacctgtttgaattt

SEQ ID NO: 855 - DNA, 21 bp, synthetic construct
  source 1..21: mol_type = other DNA
  modified_base 1: mod_base = OTHER; note = uridine-3'-phosphate
  modified_base 2: mod_base = OTHER; note = uridine-3'-phosphate
  modified_base 3: mod_base = OTHER; note = cytidine-3'-phosphate
  modified_base 4: mod_base = OTHER; note = adenosine-3'-phosphate
  modified_base 5: mod_base = OTHER; note = adenosine-3'-phosphate
  modified_base 6: mod_base = OTHER; note = adenosine-3'-phosphate
  modified_base 7: mod_base = OTHER; note = cytidine-3'-phosphate
  modified_base 8: mod_base = OTHER; note = adenosine-3'-phosphate
  modified_base 9: mod_base = OTHER; note = guanosine-3'-phosphate
  modified_base 10: mod_base = OTHER; note = guanosine-3'-phosphate
  modified_base 11: mod_base = OTHER; note = uridine-3'-phosphate
  modified_base 12: mod_base = OTHER; note = cytidine-3'-phosphate
  modified_base 13: mod_base = OTHER; note = guanosine-3'-phosphate
  modified_base 14: mod_base = OTHER; note = adenosine-3'-phosphate
  modified_base 15: mod_base = OTHER; note = guanosine-3'-phosphate
  modified_base 16: mod_base = OTHER; note = cytidine-3'-phosphate
  modified_base 17: mod_base = OTHER; note = uridine-3'-phosphate
  modified_base 18: mod_base = OTHER; note = guanosine-3'-phosphate
  modified_base 19: mod_base = OTHER; note = uridine-3'-phosphate
  misc_feature 1..19: note = RNA
  misc_feature 20..21: note = DNA
ttcaaacaggtcgagctgttt

SEQ ID NO: 856 - DNA, 21 bp, synthetic construct
  source 1..21: mol_type = other DNA
  modified_base 1: mod_base = OTHER; note = adenosine-3'-phosphate
  modified_base 2: mod_base = OTHER; note = cytidine-3'-phosphate
  modified_base 3: mod_base = OTHER; note = adenosine-3'-phosphate
  modified_base 4: mod_base = OTHER; note = guanosine-3'-phosphate
  modified_base 5: mod_base = OTHER; note = cytidine-3'-phosphate
  modified_base 6: mod_base = OTHER; note = uridine-3'-phosphate
  modified_base 7: mod_base = OTHER; note = cytidine-3'-phosphate
  modified_base 8: mod_base = OTHER; note = guanosine-3'-phosphate
  modified_base 9: mod_base = OTHER; note = adenosine-3'-phosphate
  modified_base 10: mod_base = OTHER; note = cytidine-3'-phosphate
  modified_base 11: mod_base = OTHER; note = cytidine-3'-phosphate
  modified_base 12: mod_base = OTHER; note = uridine-3'-phosphate
  modified_base 13: mod_base = OTHER; note = guanosine-3'-phosphate
  modified_base 14: mod_base = OTHER; note = uridine-3'-phosphate
  modified_base 15: mod_base = OTHER; note = uridine-3'-phosphate
  modified_base 16: mod_base = OTHER; note = uridine-3'-phosphate
  modified_base 17: mod_base = OTHER; note = guanosine-3'-phosphate
  modified_base 18: mod_base = OTHER; note = adenosine-3'-phosphate
  modified_base 19: mod_base = OTHER; note = adenosine-3'-phosphate
  misc_feature 1..19: note = RNA
  misc_feature 20..21: note = DNA
acagctcgacctgtttgaatt

SEQ ID NO: 857 - DNA, 21 bp, synthetic construct
  source 1..21: mol_type = other DNA
  modified_base 1: mod_base = OTHER; note = uridine-3'-phosphate
  modified_base 2: mod_base = OTHER; note = cytidine-3'-phosphate
  modified_base 3: mod_base = OTHER; note = adenosine-3'-phosphate
  modified_base 4: mod_base = OTHER; note = adenosine-3'-phosphate
  modified_base 5: mod_base = OTHER; note = adenosine-3'-phosphate
  modified_base 6: mod_base = OTHER; note = cytidine-3'-phosphate
  modified_base 7: mod_base = OTHER; note = adenosine-3'-phosphate
  modified_base 8: mod_base = OTHER; note = guanosine-3'-phosphate
  modified_base 9: mod_base = OTHER; note = guanosine-3'-phosphate
  modified_base 10: mod_base = OTHER; note = uridine-3'-phosphate
  modified_base 11: mod_base = OTHER; note = cytidine-3'-phosphate
  modified_base 12: mod_base = OTHER; note = guanosine-3'-phosphate
  modified_base 13: mod_base = OTHER; note = adenosine-3'-phosphate
  modified_base 14: mod_base = OTHER; note = guanosine-3'-phosphate
  modified_base 15: mod_base = OTHER; note = cytidine-3'-phosphate
  modified_base 16: mod_base = OTHER; note = uridine-3'-phosphate
  modified_base 17: mod_base = OTHER; note = guanosine-3'-phosphate
  modified_base 18: mod_base = OTHER; note = uridine-3'-phosphate
  modified_base 19: mod_base = OTHER; note = guanosine-3'-phosphate
  misc_feature 1..19: note = RNA
  misc_feature 20..21: note = DNA
tcaaacaggtcgagctgtgtt

SEQ ID NO: 858 - DNA, 21 bp, synthetic construct
  source 1..21: mol_type = other DNA
  modified_base 1: mod_base = OTHER; note = cytidine-3'-phosphate
  modified_base 2: mod_base = OTHER; note = adenosine-3'-phosphate
  modified_base 3: mod_base = OTHER; note = cytidine-3'-phosphate
  modified_base 4: mod_base = OTHER; note = adenosine-3'-phosphate
  modified_base 5: mod_base = OTHER; note = guanosine-3'-phosphate
  modified_base 6: mod_base = OTHER; note = cytidine-3'-phosphate
  modified_base 7: mod_base = OTHER; note = uridine-3'-phosphate
  modified_base 8: mod_base = OTHER; note = cytidine-3'-phosphate
  modified_base 9: mod_base = OTHER; note = guanosine-3'-phosphate
  modified_base 10: mod_base = OTHER; note = adenosine-3'-phosphate
  modified_base 11: mod_base = OTHER; note = cytidine-3'-phosphate
  modified_base 12: mod_base = OTHER; note = cytidine-3'-phosphate
  modified_base 13: mod_base = OTHER; note = uridine-3'-phosphate
  modified_base 14: mod_base = OTHER; note = guanosine-3'-phosphate
  modified_base 15: mod_base = OTHER; note = uridine-3'-phosphate
  modified_base 16: mod_base = OTHER; note = uridine-3'-phosphate
  modified_base 17: mod_base = OTHER; note = uridine-3'-phosphate
  modified_base 18: mod_base = OTHER; note = guanosine-3'-phosphate
  modified_base 19: mod_base = OTHER; note = adenosine-3'-phosphate
  misc_feature 1..19: note = RNA
  misc_feature 20..21: note = DNA
cacagctcgacctgtttgatt

SEQ ID NO: 859 - DNA, 21 bp, synthetic construct
  source 1..21: mol_type = other DNA
  modified_base 1: mod_base = OTHER; note = cytidine-3'-phosphate
  modified_base 2: mod_base = OTHER; note = adenosine-3'-phosphate
  modified_base 3: mod_base = OTHER; note = adenosine-3'-phosphate
  modified_base 4: mod_base = OTHER; note = adenosine-3'-phosphate
  modified_base 5: mod_base = OTHER; note = cytidine-3'-phosphate
  modified_base 6: mod_base = OTHER; note = adenosine-3'-phosphate
  modified_base 7: mod_base = OTHER; note = guanosine-3'-phosphate
  modified_base 8: mod_base = OTHER; note = guanosine-3'-phosphate
  modified_base 9: mod_base = OTHER; note = uridine-3'-phosphate
  modified_base 10: mod_base = OTHER; note = cytidine-3'-phosphate
  modified_base 11: mod_base = OTHER; note = guanosine-3'-phosphate
  modified_base 12: mod_base = OTHER; note = adenosine-3'-phosphate
  modified_base 13: mod_base = OTHER; note = guanosine-3'-phosphate
  modified_base 14: mod_base = OTHER; note = cytidine-3'-phosphate
  modified_base 15: mod_base = OTHER; note = uridine-3'-phosphate
  modified_base 16: mod_base = OTHER; note = guanosine-3'-phosphate
  modified_base 17: mod_base = OTHER; note = uridine-3'-phosphate
  modified_base 18: mod_base = OTHER; note = guanosine-3'-phosphate
  modified_base 19: mod_base = OTHER; note = cytidine-3'-phosphate
  misc_feature 1..19: note = RNA
  misc_feature 20..21: note = DNA
caaacaggtcgagctgtgctt

SEQ ID NO: 860 - DNA, 21 bp, synthetic construct
  source 1..21: mol_type = other DNA
  modified_base 1: mod_base = OTHER; note = guanosine-3'-phosphate
  modified_base 2: mod_base = OTHER; note = cytidine-3'-phosphate
  modified_base 3: mod_base = OTHER; note = adenosine-3'-phosphate
  modified_base 4: mod_base = OTHER; note = cytidine-3'-phosphate
  modified_base 5: mod_base = OTHER; note = adenosine-3'-phosphate
  modified_base 6: mod_base = OTHER; note = guanosine-3'-phosphate
  modified_base 7: mod_base = OTHER; note = cytidine-3'-phosphate
  modified_base 8: mod_base = OTHER; note = uridine-3'-phosphate
  modified_base 9: mod_base = OTHER; note = cytidine-3'-phosphate
  modified_base 10: mod_base = OTHER; note = guanosine-3'-phosphate
  modified_base 11: mod_base = OTHER; note = adenosine-3'-phosphate
  modified_base 12: mod_base = OTHER; note = cytidine-3'-phosphate
  modified_base 13: mod_base = OTHER; note = cytidine-3'-phosphate
  modified_base 14: mod_base = OTHER; note = uridine-3'-phosphate
  modified_base 15: mod_base = OTHER; note = guanosine-3'-phosphate
  modified_base 16: mod_base = OTHER; note = uridine-3'-phosphate
  modified_base 17: mod_base = OTHER; note = uridine-3'-phosphate
  modified_base 18: mod_base = OTHER; note = uridine-3'-phosphate
  modified_base 19: mod_base = OTHER; note = guanosine-3'-phosphate
  misc_feature 1..19: note = RNA
  misc_feature 20..21: note = DNA
gcacagctcgacctgtttgtt

SEQ ID NO: 861 - DNA, 21 bp, synthetic construct
  source 1..21: mol_type = other DNA
  modified_base 1: mod_base = OTHER; note = adenosine-3'-phosphate
  modified_base 2: mod_base = OTHER; note = adenosine-3'-phosphate
  modified_base 3: mod_base = OTHER; note = adenosine-3'-phosphate
  modified_base 4: mod_base = OTHER; note = cytidine-3'-phosphate
  modified_base 5: mod_base = OTHER; note = adenosine-3'-phosphate
  modified_base 6: mod_base = OTHER; note = guanosine-3'-phosphate
  modified_base 7: mod_base = OTHER; note = guanosine-3'-phosphate
  modified_base 8: mod_base = OTHER; note = uridine-3'-phosphate
  modified_base 9: mod_base = OTHER; note = cytidine-3'-phosphate
  modified_base 10: mod_base = OTHER; note = guanosine-3'-phosphate
  modified_base 11: mod_base = OTHER; note = adenosine-3'-phosphate
  modified_base 12: mod_base = OTHER; note = guanosine-3'-phosphate
  modified_base 13: mod_base = OTHER; note = cytidine-3'-phosphate
  modified_base 14: mod_base = OTHER; note = uridine-3'-phosphate
  modified_base 15: mod_base = OTHER; note = guanosine-3'-phosphate
  modified_base 16: mod_base = OTHER; note = uridine-3'-phosphate
  modified_base 17: mod_base = OTHER; note = guanosine-3'-phosphate
  modified_base 18: mod_base = OTHER; note = cytidine-3'-phosphate
  modified_base 19: mod_base = OTHER; note = uridine-3'-phosphate
  misc_feature 1..19: note = RNA
  misc_feature 20..21: note = DNA
aaacaggtcgagctgtgcttt

SEQ ID NO: 862 - DNA, 21 bp, synthetic construct
  source 1..21: mol_type = other DNA
  modified_base 1: mod_base = OTHER; note = adenosine-3'-phosphate
  modified_base 2: mod_base = OTHER; note = guanosine-3'-phosphate
  modified_base 3: mod_base = OTHER; note = cytidine-3'-phosphate
  modified_base 4: mod_base = OTHER; note = adenosine-3'-phosphate
  modified_base 5: mod_base = OTHER; note = cytidine-3'-phosphate
  modified_base 6: mod_base = OTHER; note = adenosine-3'-phosphate
  modified_base 7: mod_base = OTHER; note = guanosine-3'-phosphate
  modified_base 8: mod_base = OTHER; note = cytidine-3'-phosphate
  modified_base 9: mod_base = OTHER; note = uridine-3'-phosphate
  modified_base 10: mod_base = OTHER; note = cytidine-3'-phosphate
  modified_base 11: mod_base = OTHER; note = guanosine-3'-phosphate
  modified_base 12: mod_base = OTHER; note = adenosine-3'-phosphate
  modified_base 13: mod_base = OTHER; note = cytidine-3'-phosphate
  modified_base 14: mod_base = OTHER; note = cytidine-3'-phosphate
  modified_base 15: mod_base = OTHER; note = uridine-3'-phosphate
  modified_base 16: mod_base = OTHER; note = guanosine-3'-phosphate
  modified_base 17: mod_base = OTHER; note = uridine-3'-phosphate
  modified_base 18: mod_base = OTHER; note = uridine-3'-phosphate
  modified_base 19: mod_base = OTHER; note = uridine-3'-phosphate
  misc_feature 1..19: note = RNA
  misc_feature 20..21: note = DNA
agcacagctcgacctgttttt

SEQ ID NO: 863 - DNA, 21 bp, synthetic construct
  source 1..21: mol_type = other DNA
  modified_base 1: mod_base = OTHER; note = adenosine-3'-phosphate
  modified_base 2: mod_base = OTHER; note = adenosine-3'-phosphate
  modified_base 3: mod_base = OTHER; note = cytidine-3'-phosphate
  modified_base 4: mod_base = OTHER; note = adenosine-3'-phosphate
  modified_base 5: mod_base = OTHER; note = guanosine-3'-phosphate
  modified_base 6: mod_base = OTHER; note = guanosine-3'-phosphate
  modified_base 7: mod_base = OTHER; note = uridine-3'-phosphate
  modified_base 8: mod_base = OTHER; note = cytidine-3'-phosphate
  modified_base 9: mod_base = OTHER; note = guanosine-3'-phosphate
  modified_base 10: mod_base = OTHER; note = adenosine-3'-phosphate
  modified_base 11: mod_base = OTHER; note = guanosine-3'-phosphate
  modified_base 12: mod_base = OTHER; note = cytidine-3'-phosphate
  modified_base 13: mod_base = OTHER; note = uridine-3'-phosphate
  modified_base 14: mod_base = OTHER; note = guanosine-3'-phosphate
  modified_base 15: mod_base = OTHER; note = uridine-3'-phosphate
  modified_base 16: mod_base = OTHER; note = guanosine-3'-phosphate
  modified_base 17: mod_base = OTHER; note = cytidine-3'-phosphate
  modified_base 18: mod_base = OTHER; note = uridine-3'-phosphate
  modified_base 19: mod_base = OTHER; note = cytidine-3'-phosphate
  misc_feature 1..19: note = RNA
  misc_feature 20..21: note = DNA
aacaggtcgagctgtgctctt

SEQ ID NO: 864 - DNA, 21 bp, synthetic construct
  source 1..21: mol_type = other DNA
  modified_base 1: mod_base = OTHER; note = guanosine-3'-phosphate
  modified_base 2: mod_base = OTHER; note = adenosine-3'-phosphate
  modified_base 3: mod_base = OTHER; note = guanosine-3'-phosphate
  modified_base 4: mod_base = OTHER; note = cytidine-3'-phosphate
  modified_base 5: mod_base = OTHER; note = adenosine-3'-phosphate
  modified_base 6: mod_base = OTHER; note = cytidine-3'-phosphate
  modified_base 7: mod_base = OTHER; note = adenosine-3'-phosphate
  modified_base 8: mod_base = OTHER; note = guanosine-3'-phosphate
  modified_base 9: mod_base = OTHER; note = cytidine-3'-phosphate
  modified_base 10: mod_base = OTHER; note = uridine-3'-phosphate
  modified_base 11: mod_base = OTHER; note = cytidine-3'-phosphate
  modified_base 12: mod_base = OTHER; note = guanosine-3'-phosphate
  modified_base 13: mod_base = OTHER; note = adenosine-3'-phosphate
  modified_base 14: mod_base = OTHER; note = cytidine-3'-phosphate
  modified_base 15: mod_base = OTHER; note = cytidine-3'-phosphate
  modified_base 16: mod_base = OTHER; note = uridine-3'-phosphate
  modified_base 17: mod_base = OTHER; note = guanosine-3'-phosphate
  modified_base 18: mod_base = OTHER; note = uridine-3'-phosphate
  modified_base 19: mod_base = OTHER; note = uridine-3'-phosphate
  misc_feature 1..19: note = RNA
  misc_feature 20..21: note = DNA
gagcacagctcgacctgtttt

SEQ ID NO: 865 - DNA, 21 bp, synthetic construct
  source 1..21: mol_type = other DNA
  modified_base 1: mod_base = OTHER; note = cytidine-3'-phosphate
  modified_base 2: mod_base = OTHER; note = adenosine-3'-phosphate
  modified_base 3: mod_base = OTHER; note = guanosine-3'-phosphate
  modified_base 4: mod_base = OTHER; note = guanosine-3'-phosphate
  modified_base 5: mod_base = OTHER; note = uridine-3'-phosphate
  modified_base 6: mod_base = OTHER; note = cytidine-3'-phosphate
  modified_base 7: mod_base = OTHER; note = guanosine-3'-phosphate
  modified_base 8: mod_base = OTHER; note = adenosine-3'-phosphate
  modified_base 9: mod_base = OTHER; note = guanosine-3'-phosphate
  modified_base 10: mod_base = OTHER; note = cytidine-3'-phosphate
  modified_base 11: mod_base = OTHER; note = uridine-3'-phosphate
  modified_base 12: mod_base = OTHER; note = guanosine-3'-phosphate
  modified_base 13: mod_base = OTHER; note = uridine-3'-phosphate
  modified_base 14: mod_base = OTHER; note = guanosine-3'-phosphate
  modified_base 15: mod_base = OTHER; note = cytidine-3'-phosphate
  modified_base 16: mod_base = OTHER; note = uridine-3'-phosphate
  modified_base 17: mod_base = OTHER; note = cytidine-3'-phosphate
  modified_base 18: mod_base = OTHER; note = guanosine-3'-phosphate
  modified_base 19: mod_base = OTHER; note = guanosine-3'-phosphate
  misc_feature 1..19: note = RNA
  misc_feature 20..21: note = DNA
caggtcgagctgtgctcggtt

SEQ ID NO: 866 - DNA, 21 bp, synthetic construct
  source 1..21: mol_type = other DNA
  modified_base 1: mod_base = OTHER; note = cytidine-3'-phosphate
  modified_base 2: mod_base = OTHER; note = cytidine-3'-phosphate
  modified_base 3: mod_base = OTHER; note = guanosine-3'-phosphate
  modified_base 4: mod_base = OTHER; note = adenosine-3'-phosphate
  modified_base 5: mod_base = OTHER; note = guanosine-3'-phosphate
  modified_base 6: mod_base = OTHER; note = cytidine-3'-phosphate
  modified_base 7: mod_base = OTHER; note = adenosine-3'-phosphate
  modified_base 8: mod_base = OTHER; note = cytidine-3'-phosphate
  modified_base 9: mod_base = OTHER; note = adenosine-3'-phosphate
  modified_base 10: mod_base = OTHER; note = guanosine-3'-phosphate
  modified_base 11: mod_base = OTHER; note = cytidine-3'-phosphate
  modified_base 12: mod_base = OTHER; note = uridine-3'-phosphate
  modified_base 13: mod_base = OTHER; note = cytidine-3'-phosphate
  modified_base 14: mod_base = OTHER; note = guanosine-3'-phosphate
  modified_base 15: mod_base = OTHER; note = adenosine-3'-phosphate
  modified_base 16: mod_base = OTHER; note = cytidine-3'-phosphate
  modified_base 17: mod_base = OTHER; note = cytidine-3'-phosphate
  modified_base 18: mod_base = OTHER; note = uridine-3'-phosphate
  modified_base 19: mod_base = OTHER; note = guanosine-3'-phosphate
  misc_feature 1..19: note = RNA
  misc_feature 20..21: note = DNA
ccgagcacagctcgacctgtt

SEQ ID NO: 867 - DNA, 21 bp, synthetic construct
  source 1..21: mol_type = other DNA
  modified_base 1: mod_base = OTHER; note = adenosine-3'-phosphate
  modified_base 2: mod_base = OTHER; note = guanosine-3'-phosphate
  modified_base 3: mod_base = OTHER; note = guanosine-3'-phosphate
  modified_base 4: mod_base = OTHER; note = uridine-3'-phosphate
  modified_base 5: mod_base = OTHER; note = cytidine-3'-phosphate
  modified_base 6: mod_base = OTHER; note = guanosine-3'-phosphate
  modified_base 7: mod_base = OTHER; note = adenosine-3'-phosphate
  modified_base 8: mod_base = OTHER; note = guanosine-3'-phosphate
  modified_base 9: mod_base = OTHER; note = cytidine-3'-phosphate
  modified_base 10: mod_base = OTHER; note = uridine-3'-phosphate
  modified_base 11: mod_base = OTHER; note = guanosine-3'-phosphate
  modified_base 12: mod_base = OTHER; note = uridine-3'-phosphate
  modified_base 13: mod_base = OTHER; note = guanosine-3'-phosphate
  modified_base 14: mod_base = OTHER; note = cytidine-3'-phosphate
  modified_base 15: mod_base = OTHER; note = uridine-3'-phosphate
  modified_base 16: mod_base = OTHER; note = cytidine-3'-phosphate
  modified_base 17: mod_base = OTHER; note = guanosine-3'-phosphate
  modified_base 18: mod_base = OTHER; note = guanosine-3'-phosphate
  modified_base 19: mod_base = OTHER; note = guanosine-3'-phosphate
  misc_feature 1..19: note = RNA
  misc_feature 20..21: note = DNA
aggtcgagctgtgctcgggtt

SEQ ID NO: 868 - DNA, 21 bp, synthetic construct
  source 1..21: mol_type = other DNA
  modified_base 1: mod_base = OTHER; note = cytidine-3'-phosphate
  modified_base 2: mod_base = OTHER; note = cytidine-3'-phosphate
  modified_base 3: mod_base = OTHER; note = cytidine-3'-phosphate
  modified_base 4: mod_base = OTHER; note = guanosine-3'-phosphate
  modified_base 5: mod_base = OTHER; note = adenosine-3'-phosphate
  modified_base 6: mod_base = OTHER; note = guanosine-3'-phosphate
  modified_base 7: mod_base = OTHER; note = cytidine-3'-phosphate
  modified_base 8: mod_base = OTHER; note = adenosine-3'-phosphate
  modified_base 9: mod_base = OTHER; note = cytidine-3'-phosphate
  modified_base 10: mod_base = OTHER; note = adenosine-3'-phosphate
  modified_base 11: mod_base = OTHER; note = guanosine-3'-phosphate
  modified_base 12: mod_base = OTHER; note = cytidine-3'-phosphate
  modified_base 13: mod_base = OTHER; note = uridine-3'-phosphate
  modified_base 14: mod_base = OTHER; note = cytidine-3'-phosphate
  modified_base 15: mod_base = OTHER; note = guanosine-3'-phosphate
  modified_base 16: mod_base = OTHER; note = adenosine-3'-phosphate
  modified_base 17: mod_base = OTHER; note = cytidine-3'-phosphate
  modified_base 18: mod_base = OTHER; note = cytidine-3'-phosphate
  modified_base 19: mod_base = OTHER; note = uridine-3'-phosphate
  misc_feature 1..19: note = RNA
  misc_feature 20..21: note = DNA
cccgagcacagctcgaccttt

SEQ ID NO: 869 - DNA, 21 bp, synthetic construct
  source 1..21: mol_type = other DNA
  modified_base 1: mod_base = OTHER; note = guanosine-3'-phosphate
  modified_base 2: mod_base = OTHER; note = uridine-3'-phosphate
  modified_base 3: mod_base = OTHER; note = cytidine-3'-phosphate
  modified_base 4: mod_base = OTHER; note = guanosine-3'-phosphate
  modified_base 5: mod_base = OTHER; note = adenosine-3'-phosphate
  modified_base 6: mod_base = OTHER; note = guanosine-3'-phosphate
  modified_base 7: mod_base = OTHER; note = cytidine-3'-phosphate
  modified_base 8: mod_base = OTHER; note = uridine-3'-phosphate
  modified_base 9: mod_base = OTHER; note = guanosine-3'-phosphate
  modified_base 10: mod_base = OTHER; note = uridine-3'-phosphate
  modified_base 11: mod_base = OTHER; note = guanosine-3'-phosphate
  modified_base 12: mod_base = OTHER; note = cytidine-3'-phosphate
  modified_base 13: mod_base = OTHER; note = uridine-3'-phosphate
  modified_base 14: mod_base = OTHER; note = cytidine-3'-phosphate
  modified_base 15: mod_base = OTHER; note = guanosine-3'-phosphate
  modified_base 16: mod_base = OTHER; note = guanosine-3'-phosphate
  modified_base 17: mod_base = OTHER; note = guanosine-3'-phosphate
  modified_base 18: mod_base = OTHER; note = uridine-3'-phosphate
  modified_base 19: mod_base = OTHER; note = guanosine-3'-phosphate
  misc_feature 1..19: note = RNA
  misc_feature 20..21: note = DNA
gtcgagctgtgctcgggtgtt

SEQ ID NO: 870 - DNA, 21 bp, synthetic construct
  source 1..21: mol_type = other DNA
  modified_base 1: mod_base = OTHER; note = cytidine-3'-phosphate
  modified_base 2: mod_base = OTHER; note = adenosine-3'-phosphate
  modified_base 3: mod_base = OTHER; note = cytidine-3'-phosphate
  modified_base 4: mod_base = OTHER; note = cytidine-3'-phosphate
  modified_base 5: mod_base = OTHER; note = cytidine-3'-phosphate
  modified_base 6: mod_base = OTHER; note = guanosine-3'-phosphate
  modified_base 7: mod_base = OTHER; note = adenosine-3'-phosphate
  modified_base 8: mod_base = OTHER; note = guanosine-3'-phosphate
  modified_base 9: mod_base = OTHER; note = cytidine-3'-phosphate
  modified_base 10: mod_base = OTHER; note = adenosine-3'-phosphate
  modified_base 11: mod_base = OTHER; note = cytidine-3'-phosphate
  modified_base 12: mod_base = OTHER; note = adenosine-3'-phosphate
  modified_base 13: mod_base = OTHER; note = guanosine-3'-phosphate
  modified_base 14: mod_base = OTHER; note = cytidine-3'-phosphate
  modified_base 15: mod_base = OTHER; note = uridine-3'-phosphate
  modified_base 16: mod_base = OTHER; note = cytidine-3'-phosphate
  modified_base 17: mod_base = OTHER; note = guanosine-3'-phosphate
  modified_base 18: mod_base = OTHER; note = adenosine-3'-phosphate
  modified_base 19: mod_base = OTHER; note = cytidine-3'-phosphate
  misc_feature 1..19: note = RNA
  misc_feature 20..21: note = DNA
cacccgagcacagctcgactt

SEQ ID NO: 871 - DNA, 21 bp, synthetic construct
  source 1..21: mol_type = other DNA
  modified_base 1: mod_base = OTHER; note = uridine-3'-phosphate
  modified_base 2: mod_base = OTHER; note = cytidine-3'-phosphate
  modified_base 3: mod_base = OTHER; note = guanosine-3'-phosphate
  modified_base 4: mod_base = OTHER; note = adenosine-3'-phosphate
  modified_base 5: mod_base = OTHER; note = guanosine-3'-phosphate
  modified_base 6: mod_base = OTHER; note = cytidine-3'-phosphate
  modified_base 7: mod_base = OTHER; note = uridine-3'-phosphate
  modified_base 8: mod_base = OTHER; note = guanosine-3'-phosphate
  modified_base 9: mod_base = OTHER; note = uridine-3'-phosphate
  modified_base 10: mod_base = OTHER; note = guanosine-3'-phosphate
  modified_base 11: mod_base = OTHER; note = cytidine-3'-phosphate
  modified_base 12: mod_base = OTHER; note = uridine-3'-phosphate
  modified_base 13: mod_base = OTHER; note = cytidine-3'-phosphate
  modified_base 14: mod_base = OTHER; note = guanosine-3'-phosphate
  modified_base 15: mod_base = OTHER; note = guanosine-3'-phosphate
  modified_base 16: mod_base = OTHER; note = guanosine-3'-phosphate
  modified_base 17: mod_base = OTHER; note = uridine-3'-phosphate
  modified_base 18: mod_base = OTHER; note = guanosine-3'-phosphate
  modified_base 19: mod_base = OTHER; note = cytidine-3'-phosphate
  misc_feature 1..19: note = RNA
  misc_feature 20..21: note = DNA
tcgagctgtgctcgggtgctt

SEQ ID NO: 872 - DNA, 21 bp, synthetic construct
  source 1..21: mol_type = other DNA
  modified_base 1: mod_base = OTHER; note = guanosine-3'-phosphate
  modified_base 2: mod_base = OTHER; note = cytidine-3'-phosphate
  modified_base 3: mod_base = OTHER; note = adenosine-3'-phosphate
  modified_base 4: mod_base = OTHER; note = cytidine-3'-phosphate
  modified_base 5: mod_base = OTHER; note = cytidine-3'-phosphate
  modified_base 6: mod_base = OTHER; note = cytidine-3'-phosphate
  modified_base 7: mod_base = OTHER; note = guanosine-3'-phosphate
  modified_base 8: mod_base = OTHER; note = adenosine-3'-phosphate
  modified_base 9: mod_base = OTHER; note = guanosine-3'-phosphate
  modified_base 10: mod_base = OTHER; note = cytidine-3'-phosphate
  modified_base 11: mod_base = OTHER; note = adenosine-3'-phosphate
  modified_base 12: mod_base = OTHER; note = cytidine-3'-phosphate
  modified_base 13: mod_base = OTHER; note = adenosine-3'-phosphate
  modified_base 14: mod_base = OTHER; note = guanosine-3'-phosphate
  modified_base 15: mod_base = OTHER; note = cytidine-3'-phosphate
  modified_base 16: mod_base = OTHER; note = uridine-3'-phosphate
  modified_base 17: mod_base = OTHER; note = cytidine-3'-phosphate
  modified_base 18: mod_base = OTHER; note = guanosine-3'-phosphate
  modified_base 19: mod_base = OTHER; note = adenosine-3'-phosphate
  misc_feature 1..19: note = RNA
  misc_feature 20..21: note = DNA
gcacccgagcacagctcgatt

SEQ ID NO: 873 - DNA, 21 bp, synthetic construct
  source 1..21: mol_type = other DNA
  modified_base 1: mod_base = OTHER; note = adenosine-3'-phosphate
  modified_base 2: mod_base = OTHER; note = guanosine-3'-phosphate
  modified_base 3: mod_base = OTHER; note = cytidine-3'-phosphate
  modified_base 4: mod_base = OTHER; note = uridine-3'-phosphate
  modified_base 5: mod_base = OTHER; note = guanosine-3'-phosphate
  modified_base 6: mod_base = OTHER; note = cytidine-3'-phosphate
  modified_base 7: mod_base = OTHER; note = uridine-3'-phosphate
  modified_base 8: mod_base = OTHER; note = cytidine-3'-phosphate
  modified_base 9: mod_base = OTHER; note = cytidine-3'-phosphate
  modified_base 10: mod_base = OTHER; note = cytidine-3'-phosphate
  modified_base 11: mod_base = OTHER; note = adenosine-3'-phosphate
  modified_base 12: mod_base = OTHER; note = adenosine-3'-phosphate
  modified_base 13: mod_base = OTHER; note = uridine-3'-phosphate
  modified_base 14: mod_base = OTHER; note = guanosine-3'-phosphate
  modified_base 15: mod_base = OTHER; note = uridine-3'-phosphate
  modified_base 16: mod_base = OTHER; note = guanosine-3'-phosphate
  modified_base 17: mod_base = OTHER; note = cytidine-3'-phosphate
  modified_base 18: mod_base = OTHER; note = cytidine-3'-phosphate
  modified_base 19: mod_base = OTHER; note = guanosine-3'-phosphate
  misc_feature 1..19: note = RNA
  misc_feature 20..21: note = DNA
agctgctcccaatgtgccgtt

SEQ ID NO: 874 - DNA, 21 bp, synthetic construct
  source 1..21: mol_type = other DNA
  modified_base 1: mod_base = OTHER; note = cytidine-3'-phosphate
  modified_base 2: mod_base = OTHER; note = guanosine-3'-phosphate
  modified_base 3: mod_base = OTHER; note = guanosine-3'-phosphate
  modified_base 4: mod_base = OTHER; note = cytidine-3'-phosphate
  modified_base 5: mod_base = OTHER; note = adenosine-3'-phosphate
  modified_base 6: mod_base = OTHER; note = cytidine-3'-phosphate
  modified_base 7: mod_base = OTHER; note = adenosine-3'-phosphate
  modified_base 8: mod_base = OTHER; note = uridine-3'-phosphate
  modified_base 9: mod_base = OTHER; note = uridine-3'-phosphate
  modified_base 10: mod_base = OTHER; note = guanosine-3'-phosphate
  modified_base 11: mod_base = OTHER; note = guanosine-3'-phosphate
  modified_base 12: mod_base = OTHER; note = guanosine-3'-phosphate
  modified_base 13: mod_base = OTHER; note = adenosine-3'-phosphate
  modified_base 14: mod_base = OTHER; note = guanosine-3'-phosphate
  modified_base 15: mod_base = OTHER; note = cytidine-3'-phosphate
  modified_base 16: mod_base = OTHER; note = adenosine-3'-phosphate
  modified_base 17: mod_base = OTHER; note = guanosine-3'-phosphate
  modified_base 18: mod_base = OTHER; note = cytidine-3'-phosphate
  modified_base 19: mod_base = OTHER; note = uridine-3'-phosphate
  misc_feature 1..19: note = RNA
  misc_feature 20..21: note = DNA
cggcacattgggagcagcttt

SEQ ID NO: 875 - DNA, 21 bp, synthetic construct
  source 1..21: mol_type = other DNA
  modified_base 1: mod_base = OTHER; note = guanosine-3'-phosphate
  modified_base 2: mod_base = OTHER; note = cytidine-3'-phosphate
  modified_base 3: mod_base = OTHER; note = uridine-3'-phosphate
  modified_base 4: mod_base = OTHER; note = guanosine-3'-phosphate
  modified_base 5: mod_base = OTHER; note = cytidine-3'-phosphate
  modified_base 6: mod_base = OTHER; note = uridine-3'-phosphate
  modified_base 7: mod_base = OTHER; note = cytidine-3'-phosphate
  modified_base 8: mod_base = OTHER; note = cytidine-3'-phosphate
  modified_base 9: mod_base = OTHER; note = cytidine-3'-phosphate
  modified_base 10: mod_base = OTHER; note = adenosine-3'-phosphate
  modified_base 11: mod_base = OTHER; note = adenosine-3'-phosphate
  modified_base 12: mod_base = OTHER; note = uridine-3'-phosphate
  modified_base 13: mod_base = OTHER; note = guanosine-3'-phosphate
  modified_base 14: mod_base = OTHER; note = uridine-3'-phosphate
  modified_base 15: mod_base = OTHER; note = guanosine-3'-phosphate
  modified_base 16: mod_base = OTHER; note = cytidine-3'-phosphate
  modified_base 17: mod_base = OTHER; note = cytidine-3'-phosphate
  modified_base 18: mod_base = OTHER; note = guanosine-3'-phosphate
  modified_base 19: mod_base = OTHER; note = adenosine-3'-phosphate
  misc_feature 1..19: note = RNA
  misc_feature 20..21: note = DNA
gctgctcccaatgtgccgatt

SEQ ID NO: 876 - DNA, 21 bp, synthetic construct
  source 1..21: mol_type = other DNA
  modified_base 1: mod_base = OTHER; note = uridine-3'-phosphate
  modified_base 2: mod_base = OTHER; note = cytidine-3'-phosphate
  modified_base 3: mod_base = OTHER; note = guanosine-3'-phosphate
  modified_base 4: mod_base = OTHER; note = guanosine-3'-phosphate
  modified_base 5: mod_base = OTHER; note = cytidine-3'-phosphate
  modified_base 6: mod_base = OTHER; note = adenosine-3'-phosphate
  modified_base 7: mod_base = OTHER; note = cytidine-3'-phosphate
  modified_base 8: mod_base = OTHER; note = adenosine-3'-phosphate
  modified_base 9: mod_base = OTHER; note = uridine-3'-phosphate
  modified_base 10: mod_base = OTHER; note = uridine-3'-phosphate
  modified_base 11: mod_base = OTHER; note = guanosine-3'-phosphate
  modified_base 12: mod_base = OTHER; note = guanosine-3'-phosphate
  modified_base 13: mod_base = OTHER; note = guanosine-3'-phosphate
  modified_base 14: mod_base = OTHER; note = adenosine-3'-phosphate
  modified_base 15: mod_base = OTHER; note = guanosine-3'-phosphate
  modified_base 16: mod_base = OTHER; note = cytidine-3'-phosphate
  modified_base 17: mod_base = OTHER; note = adenosine-3'-phosphate
  modified_base 18: mod_base = OTHER; note = guanosine-3'-phosphate
  modified_base 19: mod_base = OTHER; note = cytidine-3'-phosphate
  misc_feature 1..19: note = RNA
  misc_feature 20..21: note = DNA
tcggcacattgggagcagctt

SEQ ID NO: 877 - DNA, 21 bp, synthetic construct
  source 1..21: mol_type = other DNA
  modified_base 1: mod_base = OTHER; note = uridine-3'-phosphate
  modified_base 2: mod_base = OTHER; note = guanosine-3'-phosphate
  modified_base 3: mod_base = OTHER; note = cytidine-3'-phosphate
  modified_base 4: mod_base = OTHER; note = uridine-3'-phosphate
  modified_base 5: mod_base = OTHER; note = cytidine-3'-phosphate
  modified_base 6: mod_base = OTHER; note = cytidine-3'-phosphate
  modified_base 7: mod_base = OTHER; note = cytidine-3'-phosphate
  modified_base 8: mod_base = OTHER; note = adenosine-3'-phosphate
  modified_base 9: mod_base = OTHER; note = adenosine-3'-phosphate
  modified_base 10: mod_base = OTHER; note = uridine-3'-phosphate
  modified_base 11: mod_base = OTHER; note = guanosine-3'-phosphate
  modified_base 12: mod_base = OTHER; note = uridine-3'-phosphate
  modified_base 13: mod_base = OTHER; note = guanosine-3'-phosphate
  modified_base 14: mod_base = OTHER; note = cytidine-3'-phosphate
  modified_base 15: mod_base = OTHER; note = cytidine-3'-phosphate
  modified_base 16: mod_base = OTHER; note = guanosine-3'-phosphate
  modified_base 17: mod_base = OTHER; note = adenosine-3'-phosphate
  modified_base 18: mod_base = OTHER; note = uridine-3'-phosphate
  modified_base 19: mod_base = OTHER; note = guanosine-3'-phosphate
  misc_feature 1..19: note = RNA
  misc_feature 20..21: note = DNA
tgctcccaatgtgccgatgtt

SEQ ID NO: 878 - DNA, 21 bp, synthetic construct
  source 1..21: mol_type = other DNA
  modified_base 1: mod_base = OTHER; note = cytidine-3'-phosphate
  modified_base 2: mod_base = OTHER; note = adenosine-3'-phosphate
  modified_base 3: mod_base = OTHER; note = uridine-3'-phosphate
  modified_base 4: mod_base = OTHER; note = cytidine-3'-phosphate
  modified_base 5: mod_base = OTHER; note = guanosine-3'-phosphate
  modified_base 6: mod_base = OTHER; note = guanosine-3'-phosphate
  modified_base 7: mod_base = OTHER; note = cytidine-3'-phosphate
  modified_base 8: mod_base = OTHER; note = adenosine-3'-phosphate
  modified_base 9: mod_base = OTHER; note = cytidine-3'-phosphate
  modified_base 10: mod_base = OTHER; note = adenosine-3'-phosphate
  modified_base 11: mod_base = OTHER; note = uridine-3'-phosphate
  modified_base 12: mod_base = OTHER; note = uridine-3'-phosphate
  modified_base 13: mod_base = OTHER; note = guanosine-3'-phosphate
  modified_base 14: mod_base = OTHER; note = guanosine-3'-phosphate
  modified_base 15: mod_base = OTHER; note = guanosine-3'-phosphate
  modified_base 16: mod_base = OTHER; note = adenosine-3'-phosphate
  modified_base 17: mod_base = OTHER; note = guanosine-3'-phosphate
  modified_base 18: mod_base = OTHER; note = cytidine-3'-phosphate
  modified_base 19: mod_base = OTHER; note = adenosine-3'-phosphate
  misc_feature 1..19: note = RNA
  misc_feature 20..21: note = DNA
catcggcacattgggagcatt

SEQ ID NO: 879 - DNA, 21 bp, synthetic construct
  source 1..21: mol_type = other DNA
  modified_base 1: mod_base = OTHER; note = uridine-3'-phosphate
  modified_base 2: mod_base = OTHER; note = cytidine-3'-phosphate
  modified_base 3: mod_base = OTHER; note = cytidine-3'-phosphate
  modified_base 4: mod_base = OTHER; note = cytidine-3'-phosphate
  modified_base 5: mod_base = OTHER; note = adenosine-3'-phosphate
  modified_base 6: mod_base = OTHER; note = adenosine-3'-phosphate
  modified_base 7: mod_base = OTHER; note = uridine-3'-phosphate
  modified_base 8: mod_base = OTHER; note = guanosine-3'-phosphate
  modified_base 9: mod_base = OTHER; note = uridine-3'-phosphate
  modified_base 10: mod_base = OTHER; note = guanosine-3'-phosphate
  modified_base 11: mod_base = OTHER; note = cytidine-3'-phosphate
  modified_base 12: mod_base = OTHER; note = cytidine-3'-phosphate
  modified_base 13: mod_base = OTHER; note = guanosine-3'-phosphate
  modified_base 14: mod_base = OTHER; note = adenosine-3'-phosphate
  modified_base 15: mod_base = OTHER; note = uridine-3'-phosphate
  modified_base 16: mod_base = OTHER; note = guanosine-3'-phosphate
  modified_base 17: mod_base = OTHER; note = uridine-3'-phosphate
  modified_base 18: mod_base = OTHER; note = cytidine-3'-phosphate
  modified_base 19: mod_base = OTHER; note = cytidine-3'-phosphate
  misc_feature 1..19: note = RNA
  misc_feature 20..21: note = DNA
tcccaatgtgccgatgtcctt

SEQ ID NO: 880 - DNA, 21 bp, synthetic construct
  source 1..21: mol_type = other DNA
  modified_base 1: mod_base = OTHER; note = guanosine-3'-phosphate
  modified_base 2: mod_base = OTHER; note = guanosine-3'-phosphate
  modified_base 3: mod_base = OTHER; note = adenosine-3'-phosphate
  modified_base 4: mod_base = OTHER; note = cytidine-3'-phosphate
  modified_base 5: mod_base = OTHER; note = adenosine-3'-phosphate
  modified_base 6: mod_base = OTHER; note = uridine-3'-phosphate
  modified_base 7: mod_base = OTHER; note = cytidine-3'-phosphate
  modified_base 8: mod_base = OTHER; note = guanosine-3'-phosphate
  modified_base 9: mod_base = OTHER; note = guanosine-3'-phosphate
  modified_base 10: mod_base = OTHER; note = cytidine-3'-phosphate
  modified_base 11: mod_base = OTHER; note = adenosine-3'-phosphate
  modified_base 12: mod_base = OTHER; note = cytidine-3'-phosphate
  modified_base 13: mod_base = OTHER; note = adenosine-3'-phosphate
  modified_base 14: mod_base = OTHER; note = uridine-3'-phosphate
  modified_base 15: mod_base = OTHER; note = uridine-3'-phosphate
  modified_base 16: mod_base = OTHER; note = guanosine-3'-phosphate
  modified_base 17: mod_base = OTHER; note = guanosine-3'-phosphate
  modified_base 18: mod_base = OTHER; note = guanosine-3'-phosphate
  modified_base 19: mod_base = OTHER; note = adenosine-3'-phosphate
  misc_feature 1..19: note = RNA
  misc_feature 20..21: note = DNA
ggacatcggcacattgggatt

SEQ ID NO: 881 - DNA, 21 bp, synthetic construct
  source 1..21: mol_type = other DNA
  modified_base 1: mod_base = OTHER; note = cytidine-3'-phosphate
  modified_base 2: mod_base = OTHER; note = cytidine-3'-phosphate
  modified_base 3: mod_base = OTHER; note = adenosine-3'-phosphate
  modified_base 4: mod_base = OTHER; note = adenosine-3'-phosphate
  modified_base 5: mod_base = OTHER; note = uridine-3'-phosphate
  modified_base 6: mod_base = OTHER; note = guanosine-3'-phosphate
  modified_base 7: mod_base = OTHER; note = uridine-3'-phosphate
  modified_base 8: mod_base = OTHER; note = guanosine-3'-phosphate
  modified_base 9: mod_base = OTHER; note = cytidine-3'-phosphate
  modified_base 10: mod_base = OTHER; note = cytidine-3'-phosphate
  modified_base 11: mod_base = OTHER; note = guanosine-3'-phosphate
  modified_base 12: mod_base = OTHER; note = adenosine-3'-phosphate
  modified_base 13: mod_base = OTHER; note = uridine-3'-phosphate
  modified_base 14: mod_base = OTHER; note = guanosine-3'-phosphate
  modified_base 15: mod_base = OTHER; note = uridine-3'-phosphate
  modified_base 16: mod_base = OTHER; note = cytidine-3'-phosphate
  modified_base 17: mod_base = OTHER; note = cytidine-3'-phosphate
  modified_base 18: mod_base = OTHER; note = guanosine-3'-phosphate
  modified_base 19: mod_base = OTHER; note = uridine-3'-phosphate
  misc_feature 1..19: note = RNA
  misc_feature 20..21: note = DNA
ccaatgtgccgatgtccgttt

SEQ ID NO: 882 - DNA, 21 bp, synthetic construct
  source 1..21: mol_type = other DNA
  modified_base 1: mod_base = OTHER; note = adenosine-3'-phosphate
  modified_base 2: mod_base = OTHER; note = cytidine-3'-phosphate
  modified_base 3: mod_base = OTHER; note = guanosine-3'-phosphate
  modified_base 4: mod_base = OTHER; note = guanosine-3'-phosphate
  modified_base 5: mod_base = OTHER; note = adenosine-3'-phosphate
  modified_base 6: mod_base = OTHER; note = cytidine-3'-phosphate
  modified_base 7: mod_base = OTHER; note = adenosine-3'-phosphate
  modified_base 8: mod_base = OTHER; note = uridine-3'-phosphate
  modified_base 9: mod_base = OTHER; note = cytidine-3'-phosphate
  modified_base 10: mod_base = OTHER; note = guanosine-3'-phosphate
  modified_base 11: mod_base = OTHER; note = guanosine-3'-phosphate
  modified_base 12: mod_base = OTHER; note = cytidine-3'-phosphate
  modified_base 13: mod_base = OTHER; note = adenosine-3'-phosphate
  modified_base 14: mod_base = OTHER; note = cytidine-3'-phosphate
  modified_base 15: mod_base = OTHER; note = adenosine-3'-phosphate
  modified_base 16: mod_base = OTHER; note = uridine-3'-phosphate
  modified_base 17: mod_base = OTHER; note = uridine-3'-phosphate
  modified_base 18: mod_base = OTHER; note = guanosine-3'-phosphate
  modified_base 19: mod_base = OTHER; note = guanosine-3'-phosphate
  misc_feature 1..19: note = RNA
  misc_feature 20..21: note = DNA
acggacatcggcacattggtt

SEQ ID NO: 883 - DNA, 21 bp, synthetic construct
  source 1..21: mol_type = other DNA
  modified_base 1: mod_base = OTHER; note = cytidine-3'-phosphate
  modified_base 2: mod_base = OTHER; note = adenosine-3'-phosphate
  modified_base 3: mod_base = OTHER; note = adenosine-3'-phosphate
  modified_base 4: mod_base = OTHER; note = uridine-3'-phosphate
  modified_base 5: mod_base = OTHER; note = guanosine-3'-phosphate
  modified_base 6: mod_base = OTHER; note = uridine-3'-phosphate
  modified_base 7: mod_base = OTHER; note = guanosine-3'-phosphate
  modified_base 8: mod_base = OTHER; note = cytidine-3'-phosphate
  modified_base 9: mod_base = OTHER; note = cytidine-3'-phosphate
  modified_base 10: mod_base = OTHER; note = guanosine-3'-phosphate
  modified_base 11: mod_base = OTHER; note = adenosine-3'-phosphate
  modified_base 12: mod_base = OTHER; note = uridine-3'-phosphate
  modified_base 13: mod_base = OTHER; note = guanosine-3'-phosphate
  modified_base 14: mod_base = OTHER; note = uridine-3'-phosphate
  modified_base 15: mod_base = OTHER; note = cytidine-3'-phosphate
  modified_base 16: mod_base = OTHER; note = cytidine-3'-phosphate
  modified_base 17: mod_base = OTHER; note = guanosine-3'-phosphate
  modified_base 18: mod_base = OTHER; note = uridine-3'-phosphate
  modified_base 19: mod_base = OTHER; note = guanosine-3'-phosphate
  misc_feature 1..19: note = RNA
  misc_feature 20..21: note = DNA
caatgtgccgatgtccgtgtt

SEQ ID NO: 884 - DNA, 21 bp, synthetic construct
  source 1..21: mol_type = other DNA
  modified_base 1: mod_base = OTHER; note = cytidine-3'-phosphate
  modified_base 2: mod_base = OTHER; note = adenosine-3'-phosphate
  modified_base 3: mod_base = OTHER; note = cytidine-3'-phosphate
  modified_base 4: mod_base = OTHER; note = guanosine-3'-phosphate
  modified_base 5: mod_base = OTHER; note = guanosine-3'-phosphate
  modified_base 6: mod_base = OTHER; note = adenosine-3'-phosphate
  modified_base 7: mod_base = OTHER; note = cytidine-3'-phosphate
  modified_base 8: mod_base = OTHER; note = adenosine-3'-phosphate
  modified_base 9: mod_base = OTHER; note = uridine-3'-phosphate
  modified_base 10: mod_base = OTHER; note = cytidine-3'-phosphate
  modified_base 11: mod_base = OTHER; note = guanosine-3'-phosphate
  modified_base 12: mod_base = OTHER; note = guanosine-3'-phosphate
  modified_base 13: mod_base = OTHER; note = cytidine-3'-phosphate
  modified_base 14: mod_base = OTHER; note = adenosine-3'-phosphate
  modified_base 15: mod_base = OTHER; note = cytidine-3'-phosphate
  modified_base 16: mod_base = OTHER; note = adenosine-3'-phosphate
  modified_base 17: mod_base = OTHER; note = uridine-3'-phosphate
  modified_base 18: mod_base = OTHER; note = uridine-3'-phosphate
  modified_base 19: mod_base = OTHER; note = guanosine-3'-phosphate
  misc_feature 1..19: note = RNA
  misc_feature 20..21: note = DNA
cacggacatcggcacattgtt

SEQ ID NO: 885 - DNA, 21 bp, synthetic construct
  source 1..21: mol_type = other DNA
  modified_base 1: mod_base = OTHER; note = adenosine-3'-phosphate
  modified_base 2: mod_base = OTHER; note = adenosine-3'-phosphate
  modified_base 3: mod_base = OTHER; note = uridine-3'-phosphate
  modified_base 4: mod_base = OTHER; note = guanosine-3'-phosphate
  modified_base 5: mod_base = OTHER; note = uridine-3'-phosphate
  modified_base 6: mod_base = OTHER; note = guanosine-3'-phosphate
  modified_base 7: mod_base = OTHER; note = cytidine-3'-phosphate
  modified_base 8: mod_base = OTHER; note = cytidine-3'-phosphate
  modified_base 9: mod_base = OTHER; note = guanosine-3'-phosphate
  modified_base 10: mod_base = OTHER; note = adenosine-3'-phosphate
  modified_base 11: mod_base = OTHER; note = uridine-3'-phosphate
  modified_base 12: mod_base = OTHER; note = guanosine-3'-phosphate
  modified_base 13: mod_base = OTHER; note = uridine-3'-phosphate
  modified_base 14: mod_base = OTHER; note = cytidine-3'-phosphate
  modified_base 15: mod_base = OTHER; note = cytidine-3'-phosphate
  modified_base 16: mod_base = OTHER; note = guanosine-3'-phosphate
  modified_base 17: mod_base = OTHER; note = uridine-3'-phosphate
  modified_base 18: mod_base = OTHER; note = guanosine-3'-phosphate
  modified_base 19: mod_base = OTHER; note = guanosine-3'-phosphate
  misc_feature 1..19: note = RNA
  misc_feature 20..21: note = DNA
aatgtgccgatgtccgtggtt

SEQ ID NO: 886 - DNA, 21 bp, synthetic construct
  source 1..21: mol_type = other DNA
  modified_base 1: mod_base = OTHER; note = cytidine-3'-phosphate
  modified_base 2: mod_base = OTHER; note = cytidine-3'-phosphate
  modified_base 3: mod_base = OTHER; note = adenosine-3'-phosphate
  modified_base 4: mod_base = OTHER; note = cytidine-3'-phosphate
  modified_base 5: mod_base = OTHER; note = guanosine-3'-phosphate
  modified_base 6: mod_base = OTHER; note = guanosine-3'-phosphate
  modified_base 7: mod_base = OTHER; note = adenosine-3'-phosphate
  modified_base 8: mod_base = OTHER; note = cytidine-3'-phosphate
  modified_base 9: mod_base = OTHER; note = adenosine-3'-phosphate
  modified_base 10: mod_base = OTHER; note = uridine-3'-phosphate
  modified_base 11: mod_base = OTHER; note = cytidine-3'-phosphate
  modified_base 12: mod_base = OTHER; note = guanosine-3'-phosphate
  modified_base 13: mod_base = OTHER; note = guanosine-3'-phosphate
  modified_base 14: mod_base = OTHER; note = cytidine-3'-phosphate
  modified_base 15: mod_base = OTHER; note = adenosine-3'-phosphate
  modified_base 16: mod_base = OTHER; note = cytidine-3'-phosphate
  modified_base 17: mod_base = OTHER; note = adenosine-3'-phosphate
  modified_base 18: mod_base = OTHER; note = uridine-3'-phosphate
  modified_base 19: mod_base = OTHER; note = uridine-3'-phosphate
  misc_feature 1..19: note = RNA
  misc_feature 20..21: note = DNA
ccacggacatcggcacatttt

SEQ ID NO: 887 - DNA, 21 bp, synthetic construct
  source 1..21: mol_type = other DNA
  modified_base 1: mod_base = OTHER; note = cytidine-3'-phosphate
  modified_base 2: mod_base = OTHER; note = cytidine-3'-phosphate
  modified_base 3: mod_base = OTHER; note = guanosine-3'-phosphate
  modified_base 4: mod_base = OTHER; note = adenosine-3'-phosphate
  modified_base 5: mod_base = OTHER; note = uridine-3'-phosphate
  modified_base 6: mod_base = OTHER; note = guanosine-3'-phosphate
  modified_base 7: mod_base = OTHER; note = uridine-3'-phosphate
  modified_base 8: mod_base = OTHER; note = cytidine-3'-phosphate
  modified_base 9: mod_base = OTHER; note = cytidine-3'-phosphate
  modified_base 10: mod_base = OTHER; note = guanosine-3'-phosphate
  modified_base 11: mod_base = OTHER; note = uridine-3'-phosphate
  modified_base 12: mod_base = OTHER; note = guanosine-3'-phosphate
  modified_base 13: mod_base = OTHER; note = guanosine-3'-phosphate
  modified_base 14: mod_base = OTHER; note = guanosine-3'-phosphate
  modified_base 15: mod_base = OTHER; note = cytidine-3'-phosphate
  modified_base 16: mod_base = OTHER; note = adenosine-3'-phosphate
  modified_base 17: mod_base = OTHER; note = guanosine-3'-phosphate
  modified_base 18: mod_base = OTHER; note = adenosine-3'-phosphate
  modified_base 19: mod_base = OTHER; note = adenosine-3'-phosphate
  misc_feature 1..19: note = RNA
  misc_feature 20..21: note = DNA
ccgatgtccgtgggcagaatt

SEQ ID NO: 888 - DNA, 21 bp, synthetic construct
  source 1..21: mol_type = other DNA
  modified_base 1: mod_base = OTHER; note = uridine-3'-phosphate
  modified_base 2: mod_base = OTHER; note = uridine-3'-phosphate
  modified_base 3: mod_base = OTHER; note = cytidine-3'-phosphate
  modified_base 4: mod_base = OTHER; note = uridine-3'-phosphate
  modified_base 5: mod_base = OTHER; note = guanosine-3'-phosphate
  modified_base 6: mod_base = OTHER; note = cytidine-3'-phosphate
  modified_base 7: mod_base = OTHER; note = cytidine-3'-phosphate
  modified_base 8: mod_base = OTHER; note = cytidine-3'-phosphate
  modified_base 9: mod_base = OTHER; note = adenosine-3'-phosphate
  modified_base 10: mod_base = OTHER; note = cytidine-3'-phosphate
  modified_base 11: mod_base = OTHER; note = guanosine-3'-phosphate
  modified_base 12: mod_base = OTHER; note = guanosine-3'-phosphate
  modified_base 13: mod_base = OTHER; note = adenosine-3'-phosphate
  modified_base 14: mod_base = OTHER; note = cytidine-3'-phosphate
  modified_base 15: mod_base = OTHER; note = adenosine-3'-phosphate
  modified_base 16: mod_base = OTHER; note = uridine-3'-phosphate
  modified_base 17: mod_base = OTHER; note = cytidine-3'-phosphate
  modified_base 18: mod_base = OTHER; note = guanosine-3'-phosphate
  modified_base 19: mod_base = OTHER; note = guanosine-3'-phosphate
  misc_feature 1..19: note = RNA
  misc_feature 20..21: note = DNA
ttctgcccacggacatcggtt

SEQ ID NO: 889 - DNA, 21 bp, synthetic construct
  source 1..21: mol_type = other DNA
  modified_base 1: mod_base = OTHER; note = guanosine-3'-phosphate
  modified_base 2: mod_base = OTHER; note = adenosine-3'-phosphate
  modified_base 3: mod_base = OTHER; note = uridine-3'-phosphate
  modified_base 4: mod_base = OTHER; note = guanosine-3'-phosphate
  modified_base 5: mod_base = OTHER; note = uridine-3'-phosphate
  modified_base 6: mod_base = OTHER; note = cytidine-3'-phosphate
  modified_base 7: mod_base = OTHER; note = cytidine-3'-phosphate
  modified_base 8: mod_base = OTHER; note = guanosine-3'-phosphate
  modified_base 9: mod_base = OTHER; note = uridine-3'-phosphate
  modified_base 10: mod_base = OTHER; note = guanosine-3'-phosphate
  modified_base 11: mod_base = OTHER; note = guanosine-3'-phosphate
  modified_base 12: mod_base = OTHER; note = guanosine-3'-phosphate
  modified_base 13: mod_base = OTHER; note = cytidine-3'-phosphate
  modified_base 14: mod_base = OTHER; note = adenosine-3'-phosphate
  modified_base 15: mod_base = OTHER; note = guanosine-3'-phosphate
  modified_base 16: mod_base = OTHER; note = adenosine-3'-phosphate
  modified_base 17: mod_base = OTHER; note = adenosine-3'-phosphate
  modified_base 18: mod_base = OTHER; note = uridine-3'-phosphate
  modified_base 19: mod_base = OTHER; note = guanosine-3'-phosphate
  misc_feature 1..19: note = RNA
  misc_feature 20..21: note = DNA
gatgtccgtgggcagaatgtt

SEQ ID NO: 890 - DNA, 21 bp, synthetic construct
  source 1..21: mol_type = other DNA
  modified_base 1: mod_base = OTHER; note = cytidine-3'-phosphate
  modified_base 2: mod_base = OTHER; note = adenosine-3'-phosphate
  modified_base 3: mod_base = OTHER; note = uridine-3'-phosphate
  modified_base 4: mod_base = OTHER; note = uridine-3'-phosphate
  modified_base 5: mod_base = OTHER; note = cytidine-3'-phosphate
  modified_base 6: mod_base = OTHER; note = uridine-3'-phosphate
  modified_base 7: mod_base = OTHER; note = guanosine-3'-phosphate
  modified_base 8: mod_base = OTHER; note = cytidine-3'-phosphate
  modified_base 9: mod_base = OTHER; note = cytidine-3'-phosphate
  modified_base 10: mod_base = OTHER; note = cytidine-3'-phosphate
  modified_base 11: mod_base = OTHER; note = adenosine-3'-phosphate
  modified_base 12: mod_base = OTHER; note = cytidine-3'-phosphate
  modified_base 13: mod_base = OTHER; note = guanosine-3'-phosphate
  modified_base 14: mod_base = OTHER; note = guanosine-3'-phosphate
  modified_base 15: mod_base = OTHER; note = adenosine-3'-phosphate
  modified_base 16: mod_base = OTHER; note = cytidine-3'-phosphate
  modified_base 17: mod_base = OTHER; note = adenosine-3'-phosphate
  modified_base 18: mod_base = OTHER; note = uridine-3'-phosphate
  modified_base 19: mod_base = OTHER; note = cytidine-3'-phosphate
  misc_feature 1..19: note = RNA
  misc_feature 20..21: note = DNA
cattctgcccacggacatctt

SEQ ID NO: 891 - DNA, 21 bp, synthetic construct
  source 1..21: mol_type = other DNA
  modified_base 1: mod_base = OTHER; note = guanosine-3'-phosphate
  modified_base 2: mod_base = OTHER; note = uridine-3'-phosphate
  modified_base 3: mod_base = OTHER; note = cytidine-3'-phosphate
  modified_base 4: mod_base = OTHER; note = cytidine-3'-phosphate
  modified_base 5: mod_base = OTHER; note = guanosine-3'-phosphate
  modified_base 6: mod_base = OTHER; note = uridine-3'-phosphate
  modified_base 7: mod_base = OTHER; note = guanosine-3'-phosphate
  modified_base 8: mod_base = OTHER; note = guanosine-3'-phosphate
  modified_base 9: mod_base = OTHER; note = guanosine-3'-phosphate
  modified_base 10: mod_base = OTHER; note = cytidine-3'-phosphate
  modified_base 11: mod_base = OTHER; note = adenosine-3'-phosphate
  modified_base 12: mod_base = OTHER; note = guanosine-3'-phosphate
  modified_base 13: mod_base = OTHER; note = adenosine-3'-phosphate
  modified_base 14: mod_base = OTHER; note = adenosine-3'-phosphate
  modified_base 15: mod_base = OTHER; note = uridine-3'-phosphate
  modified_base 16: mod_base = OTHER; note = guanosine-3'-phosphate
  modified_base 17: mod_base = OTHER; note = adenosine-3'-phosphate
  modified_base 18: mod_base = OTHER; note = cytidine-3'-phosphate
  modified_base 19: mod_base = OTHER; note = uridine-3'-phosphate
  misc_feature 1..19: note = RNA
  misc_feature 20..21: note = DNA
gtccgtgggcagaatgacttt

SEQ ID NO: 892 - DNA, 21 bp, synthetic construct
  source 1..21: mol_type = other DNA
  modified_base 1: mod_base = OTHER; note = adenosine-3'-phosphate
  modified_base 2: mod_base = OTHER; note = guanosine-3'-phosphate
  modified_base 3: mod_base = OTHER; note = uridine-3'-phosphate
  modified_base 4: mod_base = OTHER; note = cytidine-3'-phosphate
  modified_base 5: mod_base = OTHER; note = adenosine-3'-phosphate
  modified_base 6: mod_base = OTHER; note = uridine-3'-phosphate
  modified_base 7: mod_base = OTHER; note = uridine-3'-phosphate
  modified_base 8: mod_base = OTHER; note = cytidine-3'-phosphate
  modified_base 9: mod_base = OTHER; note = uridine-3'-phosphate
  modified_base 10: mod_base = OTHER; note = guanosine-3'-phosphate
  modified_base 11: mod_base = OTHER; note = cytidine-3'-phosphate
  modified_base 12: mod_base = OTHER; note = cytidine-3'-phosphate
  modified_base 13: mod_base = OTHER; note = cytidine-3'-phosphate
  modified_base 14: mod_base = OTHER; note = adenosine-3'-phosphate
  modified_base 15: mod_base = OTHER; note = cytidine-3'-phosphate
  modified_base 16: mod_base = OTHER; note = guanosine-3'-phosphate
  modified_base 17: mod_base = OTHER; note = guanosine-3'-phosphate
  modified_base 18: mod_base = OTHER; note = adenosine-3'-phosphate
  modified_base 19: mod_base = OTHER; note = cytidine-3'-phosphate
  misc_feature 1..19: note = RNA
  misc_feature 20..21: note = DNA
agtcattctgcccacggactt

SEQ ID NO: 893 - DNA, 21 bp, synthetic construct
  source 1..21: mol_type = other DNA
  modified_base 1: mod_base = OTHER; note = uridine-3'-phosphate
  modified_base 2: mod_base = OTHER; note = cytidine-3'-phosphate
  modified_base 3: mod_base = OTHER; note = cytidine-3'-phosphate
  modified_base 4: mod_base = OTHER; note = guanosine-3'-phosphate
  modified_base 5: mod_base = OTHER; note = uridine-3'-phosphate
  modified_base 6: mod_base = OTHER; note = guanosine-3'-phosphate
  modified_base 7: mod_base = OTHER; note = guanosine-3'-phosphate
  modified_base 8: mod_base = OTHER; note = guanosine-3'-phosphate
  modified_base 9: mod_base = OTHER; note = cytidine-3'-phosphate
  modified_base 10: mod_base = OTHER; note = adenosine-3'-phosphate
  modified_base 11: mod_base = OTHER; note = guanosine-3'-phosphate
  modified_base 12: mod_base = OTHER; note = adenosine-3'-phosphate
  modified_base 13: mod_base = OTHER; note = adenosine-3'-phosphate
  modified_base 14: mod_base = OTHER; note = uridine-3'-phosphate
  modified_base 15: mod_base = OTHER; note = guanosine-3'-phosphate
  modified_base 16: mod_base = OTHER; note = adenosine-3'-phosphate
  modified_base 17: mod_base = OTHER; note = cytidine-3'-phosphate
  modified_base 18: mod_base = OTHER; note = uridine-3'-phosphate
  modified_base 19: mod_base = OTHER; note = uridine-3'-phosphate
  misc_feature 1..19: note = RNA
  misc_feature 20..21: note = DNA
tccgtgggcagaatgactttt

SEQ ID NO: 894 - DNA, 21 bp, synthetic construct
  source 1..21: mol_type = other DNA
  modified_base 1: mod_base = OTHER; note = adenosine-3'-phosphate
  modified_base 2: mod_base = OTHER; note = adenosine-3'-phosphate
  modified_base 3: mod_base = OTHER; note = guanosine-3'-phosphate
  modified_base 4: mod_base = OTHER; note = uridine-3'-phosphate
  modified_base 5: mod_base = OTHER; note = cytidine-3'-phosphate
  modified_base 6: mod_base = OTHER; note = adenosine-3'-phosphate
  modified_base 7: mod_base = OTHER; note = uridine-3'-phosphate
  modified_base 8: mod_base = OTHER; note = uridine-3'-phosphate
  modified_base 9: mod_base = OTHER; note = cytidine-3'-phosphate
  modified_base 10: mod_base = OTHER; note = uridine-3'-phosphate
  modified_base 11: mod_base = OTHER; note = guanosine-3'-phosphate
  modified_base 12: mod_base = OTHER; note = cytidine-3'-phosphate
  modified_base 13: mod_base = OTHER; note = cytidine-3'-phosphate
  modified_base 14: mod_base = OTHER; note = cytidine-3'-phosphate
  modified_base 15: mod_base = OTHER; note = adenosine-3'-phosphate
  modified_base 16: mod_base = OTHER; note = cytidine-3'-phosphate
  modified_base 17: mod_base = OTHER; note = guanosine-3'-phosphate
  modified_base 18: mod_base = OTHER; note = guanosine-3'-phosphate
  modified_base 19: mod_base = OTHER; note = adenosine-3'-phosphate
  misc_feature 1..19: note = RNA
  misc_feature 20..21: note = DNA
aagtcattctgcccacggatt

SEQ ID NO: 895 - DNA, 21 bp, synthetic construct
  source 1..21: mol_type = other DNA
  modified_base 1: mod_base = OTHER; note = uridine-3'-phosphate
  modified_base 2: mod_base = OTHER; note = guanosine-3'-phosphate
  modified_base 3: mod_base = OTHER; note = guanosine-3'-phosphate
  modified_base 4: mod_base = OTHER; note = guanosine-3'-phosphate
  modified_base 5: mod_base = OTHER; note = cytidine-3'-phosphate
  modified_base 6: mod_base = OTHER; note = adenosine-3'-phosphate
  modified_base 7: mod_base = OTHER; note = guanosine-3'-phosphate
  modified_base 8: mod_base = OTHER; note = adenosine-3'-phosphate
  modified_base 9: mod_base = OTHER; note = adenosine-3'-phosphate
  modified_base 10: mod_base = OTHER; note = uridine-3'-phosphate
  modified_base 11: mod_base = OTHER; note = guanosine-3'-phosphate
  modified_base 12: mod_base = OTHER; note = adenosine-3'-phosphate
  modified_base 13: mod_base = OTHER; note = cytidine-3'-phosphate
  modified_base 14: mod_base = OTHER; note = uridine-3'-phosphate
  modified_base 15: mod_base = OTHER; note = uridine-3'-phosphate
  modified_base 16: mod_base = OTHER; note = uridine-3'-phosphate
  modified_base 17: mod_base = OTHER; note = uridine-3'-phosphate
  modified_base 18: mod_base = OTHER; note = adenosine-3'-phosphate
  modified_base 19: mod_base = OTHER; note = uridine-3'-phosphate
  misc_feature 1..19: note = RNA
  misc_feature 20..21: note = DNA
tgggcagaatgacttttattt

SEQ ID NO: 896 - DNA, 21 bp, synthetic construct
  source 1..21: mol_type = other DNA
  modified_base 1: mod_base = OTHER; note = adenosine-3'-phosphate
  modified_base 2: mod_base = OTHER; note = uridine-3'-phosphate
  modified_base 3: mod_base = OTHER; note = adenosine-3'-phosphate
  modified_base 4: mod_base = OTHER; note = adenosine-3'-phosphate
  modified_base 5: mod_base = OTHER; note = adenosine-3'-phosphate
  modified_base 6: mod_base = OTHER; note = adenosine-3'-phosphate
  modified_base 7: mod_base = OTHER; note = guanosine-3'-phosphate
  modified_base 8: mod_base = OTHER; note = uridine-3'-phosphate
  modified_base 9: mod_base = OTHER; note = cytidine-3'-phosphate
  modified_base 10: mod_base = OTHER; note = adenosine-3'-phosphate
  modified_base 11: mod_base = OTHER; note = uridine-3'-phosphate
  modified_base 12: mod_base = OTHER; note = uridine-3'-phosphate
  modified_base 13: mod_base = OTHER; note = cytidine-3'-phosphate
  modified_base 14: mod_base = OTHER; note = uridine-3'-phosphate
  modified_base 15: mod_base = OTHER; note = guanosine-3'-phosphate
  modified_base 16: mod_base = OTHER; note = cytidine-3'-phosphate
  modified_base 17: mod_base = OTHER; note = cytidine-3'-phosphate
  modified_base 18: mod_base = OTHER; note = cytidine-3'-phosphate
  modified_base 19: mod_base = OTHER; note = adenosine-3'-phosphate
  misc_feature 1..19: note = RNA
  misc_feature 20..21: note = DNA
ataaaagtcattctgcccatt

SEQ ID NO: 897 - DNA, 21 bp, synthetic construct
  source 1..21: mol_type = other DNA
  modified_base 1: mod_base = OTHER; note = adenosine-3'-phosphate
  modified_base 2: mod_base = OTHER; note = cytidine-3'-phosphate
  modified_base 3: mod_base = OTHER; note = uridine-3'-phosphate
  modified_base 4: mod_base = OTHER; note = uridine-3'-phosphate
  modified_base 5: mod_base = OTHER; note = uridine-3'-phosphate
  modified_base 6: mod_base = OTHER; note = uridine-3'-phosphate
  modified_base 7: mod_base = OTHER; note = adenosine-3'-phosphate
  modified_base 8: mod_base = OTHER; note = uridine-3'-phosphate
  modified_base 9: mod_base = OTHER; note = uridine-3'-phosphate
  modified_base 10: mod_base = OTHER; note = guanosine-3'-phosphate
  modified_base 11: mod_base = OTHER; note = adenosine-3'-phosphate
  modified_base 12: mod_base = OTHER; note = guanosine-3'-phosphate
  modified_base 13: mod_base = OTHER; note = cytidine-3'-phosphate
  modified_base 14: mod_base = OTHER; note = uridine-3'-phosphate
  modified_base 15: mod_base = OTHER; note = cytidine-3'-phosphate
  modified_base 16: mod_base = OTHER; note = uridine-3'-phosphate
  modified_base 17: mod_base = OTHER; note = uridine-3'-phosphate
  modified_base 18: mod_base = OTHER; note = guanosine-3'-phosphate
  modified_base 19: mod_base = OTHER; note = uridine-3'-phosphate
  misc_feature 1..19: note = RNA
  misc_feature 20..21: note = DNA
acttttattgagctcttgttt

SEQ ID NO: 898 - DNA, 21 bp, synthetic construct
  source 1..21: mol_type = other DNA
  modified_base 1: mod_base = OTHER; note = adenosine-3'-phosphate
  modified_base 2: mod_base = OTHER; note = cytidine-3'-phosphate
  modified_base 3: mod_base = OTHER; note = adenosine-3'-phosphate
  modified_base 4: mod_base = OTHER; note = adenosine-3'-phosphate
  modified_base 5: mod_base = OTHER; note = guanosine-3'-phosphate
  modified_base 6: mod_base = OTHER; note = adenosine-3'-phosphate
  modified_base 7: mod_base = OTHER; note = guanosine-3'-phosphate
  modified_base 8: mod_base = OTHER; note = cytidine-3'-phosphate
  modified_base 9: mod_base = OTHER; note = uridine-3'-phosphate
  modified_base 10: mod_base = OTHER; note = cytidine-3'-phosphate
  modified_base 11: mod_base = OTHER; note = adenosine-3'-phosphate
  modified_base 12: mod_base = OTHER; note = adenosine-3'-phosphate
  modified_base 13: mod_base = OTHER; note = uridine-3'-phosphate
  modified_base 14: mod_base = OTHER; note = adenosine-3'-phosphate
  modified_base 15: mod_base = OTHER; note = adenosine-3'-phosphate
  modified_base 16: mod_base = OTHER; note = adenosine-3'-phosphate
  modified_base 17: mod_base = OTHER; note = adenosine-3'-phosphate
  modified_base 18: mod_base = OTHER; note = guanosine-3'-phosphate
  modified_base 19: mod_base = OTHER; note = uridine-3'-phosphate
  misc_feature 1..19: note = RNA
  misc_feature 20..21: note = DNA
acaagagctcaataaaagttt

SEQ ID NO: 899 - DNA, 21 bp, synthetic construct
  source 1..21: mol_type = other DNA
  modified_base 1: mod_base = OTHER; note = adenosine-3'-phosphate
  modified_base 2: mod_base = OTHER; note = uridine-3'-phosphate
  modified_base 3: mod_base = OTHER; note = uridine-3'-phosphate
  modified_base 4: mod_base = OTHER; note = guanosine-3'-phosphate
  modified_base 5: mod_base = OTHER; note = adenosine-3'-phosphate
  modified_base 6: mod_base = OTHER; note = guanosine-3'-phosphate
  modified_base 7: mod_base = OTHER; note = cytidine-3'-phosphate
  modified_base 8: mod_base = OTHER; note = uridine-3'-phosphate
  modified_base 9: mod_base = OTHER; note = cytidine-3'-phosphate
  modified_base 10: mod_base = OTHER; note = uridine-3'-phosphate
  modified_base 11: mod_base = OTHER; note = uridine-3'-phosphate
  modified_base 12: mod_base = OTHER; note = guanosine-3'-phosphate
  modified_base 13: mod_base = OTHER; note = uridine-3'-phosphate
  modified_base 14: mod_base = OTHER; note = uridine-3'-phosphate
  modified_base 15: mod_base = OTHER; note = cytidine-3'-phosphate
  modified_base 16: mod_base = OTHER; note = cytidine-3'-phosphate
  modified_base 17: mod_base = OTHER; note = guanosine-3'-phosphate
  modified_base 18: mod_base = OTHER; note = uridine-3'-phosphate
  modified_base 19: mod_base = OTHER; note = guanosine-3'-phosphate
  misc_feature 1..19: note = RNA
  misc_feature 20..21: note = DNA
attgagctcttgttccgtgtt

SEQ ID NO: 900 - DNA, 21 bp, synthetic construct
  source 1..21: mol_type = other DNA
  modified_base 1: mod_base = OTHER; note = cytidine-3'-phosphate
  modified_base 2: mod_base = OTHER; note = adenosine-3'-phosphate
  modified_base 3: mod_base = OTHER; note = cytidine-3'-phosphate
  modified_base 4: mod_base = OTHER; note = guanosine-3'-phosphate
  modified_base 5: mod_base = OTHER; note = guanosine-3'-phosphate
  modified_base 6: mod_base = OTHER; note = adenosine-3'-phosphate
  modified_base 7: mod_base = OTHER; note = adenosine-3'-phosphate
  modified_base 8: mod_base = OTHER; note = cytidine-3'-phosphate
  modified_base 9: mod_base = OTHER; note = adenosine-3'-phosphate
  modified_base 10: mod_base = OTHER; note = adenosine-3'-phosphate
  modified_base 11: mod_base = OTHER; note = guanosine-3'-phosphate
  modified_base 12: mod_base = OTHER; note = adenosine-3'-phosphate
  modified_base 13: mod_base = OTHER; note = guanosine-3'-phosphate
  modified_base 14: mod_base = OTHER; note = cytidine-3'-phosphate
  modified_base 15: mod_base = OTHER; note = uridine-3'-phosphate
  modified_base 16: mod_base = OTHER; note = cytidine-3'-phosphate
  modified_base 17: mod_base = OTHER; note = adenosine-3'-phosphate
  modified_base 18: mod_base = OTHER; note = adenosine-3'-phosphate
  modified_base 19: mod_base = OTHER; note = uridine-3'-phosphate
  misc_feature 1..19: note = RNA
  misc_feature 20..21: note = DNA
cacggaacaagagctcaattt

SEQ ID NO: 901 - DNA, 21 bp, synthetic construct
  source 1..21: mol_type = other DNA
  modified_base 1: mod_base = OTHER; note = adenosine-3'-phosphate
  modified_base 2: mod_base = OTHER; note = guanosine-3'-phosphate
  modified_base 3: mod_base = OTHER; note = cytidine-3'-phosphate
  modified_base 4: mod_base = OTHER; note = uridine-3'-phosphate
  modified_base 5: mod_base = OTHER; note = cytidine-3'-phosphate
  modified_base 6: mod_base = OTHER; note = uridine-3'-phosphate
  modified_base 7: mod_base = OTHER; note = uridine-3'-phosphate
  modified_base 8: mod_base = OTHER; note = guanosine-3'-phosphate
  modified_base 9: mod_base = OTHER; note = uridine-3'-phosphate
  modified_base 10: mod_base = OTHER; note = uridine-3'-phosphate
  modified_base 11: mod_base = OTHER; note = cytidine-3'-phosphate
  modified_base 12: mod_base = OTHER; note = cytidine-3'-phosphate
  modified_base 13: mod_base = OTHER; note = guanosine-3'-phosphate
  modified_base 14: mod_base = OTHER; note = uridine-3'-phosphate
  modified_base 15: mod_base = OTHER; note = guanosine-3'-phosphate
  modified_base 16: mod_base = OTHER; note = cytidine-3'-phosphate
  modified_base 17: mod_base = OTHER; note = cytidine-3'-phosphate
  modified_base 18: mod_base = OTHER; note = adenosine-3'-phosphate
  modified_base 19: mod_base = OTHER; note = guanosine-3'-phosphate
  misc_feature 1..19: note = RNA
  misc_feature 20..21: note = DNA
agctcttgttccgtgccagtt

SEQ ID NO: 902 - DNA, 21 bp, synthetic construct
  source 1..21: mol_type = other DNA
  modified_base 1: mod_base = OTHER; note = cytidine-3'-phosphate
  modified_base 2: mod_base = OTHER; note = uridine-3'-phosphate
  modified_base 3: mod_base = OTHER; note = guanosine-3'-phosphate
  modified_base 4: mod_base = OTHER; note = guanosine-3'-phosphate
  modified_base 5: mod_base = OTHER; note = cytidine-3'-phosphate
  modified_base 6: mod_base = OTHER; note = adenosine-3'-phosphate
  modified_base 7: mod_base = OTHER; note = cytidine-3'-phosphate
  modified_base 8: mod_base = OTHER; note = guanosine-3'-phosphate
  modified_base 9: mod_base = OTHER; note = guanosine-3'-phosphate
  modified_base 10: mod_base = OTHER; note = adenosine-3'-phosphate
  modified_base 11: mod_base = OTHER; note = adenosine-3'-phosphate
  modified_base 12: mod_base = OTHER; note = cytidine-3'-phosphate
  modified_base 13: mod_base = OTHER; note = adenosine-3'-phosphate
  modified_base 14: mod_base = OTHER; note = adenosine-3'-phosphate
  modified_base 15: mod_base = OTHER; note = guanosine-3'-phosphate
  modified_base 16: mod_base = OTHER; note = adenosine-3'-phosphate
  modified_base 17: mod_base = OTHER; note = guanosine-3'-phosphate
  modified_base 18: mod_base = OTHER; note = cytidine-3'-phosphate
  modified_base 19: mod_base = OTHER; note = uridine-3'-phosphate
  misc_feature 1..19: note = RNA
  misc_feature 20..21: note = DNA
ctggcacggaacaagagcttt

SEQ ID NO: 903 - DNA, 21 bp, synthetic construct
  source 1..21: mol_type = other DNA
  modified_base 1: mod_base = OTHER; note = guanosine-3'-phosphate
  modified_base 2: mod_base = OTHER; note = cytidine-3'-phosphate
  modified_base 3: mod_base = OTHER; note = uridine-3'-phosphate
  modified_base 4: mod_base = OTHER; note = cytidine-3'-phosphate
  modified_base 5: mod_base = OTHER; note = uridine-3'-phosphate
  modified_base 6: mod_base = OTHER; note = uridine-3'-phosphate
  modified_base 7: mod_base = OTHER; note = guanosine-3'-phosphate
  modified_base 8: mod_base = OTHER; note = uridine-3'-phosphate
  modified_base 9: mod_base = OTHER; note = uridine-3'-phosphate
  modified_base 10: mod_base = OTHER; note = cytidine-3'-phosphate
  modified_base 11: mod_base = OTHER; note = cytidine-3'-phosphate
  modified_base 12: mod_base = OTHER; note = guanosine-3'-phosphate
  modified_base 13: mod_base = OTHER; note = uridine-3'-phosphate
  modified_base 14: mod_base = OTHER; note = guanosine-3'-phosphate
  modified_base 15: mod_base = OTHER; note = cytidine-3'-phosphate
  modified_base 16: mod_base = OTHER; note = cytidine-3'-phosphate
  modified_base 17: mod_base = OTHER; note = adenosine-3'-phosphate
  modified_base 18: mod_base = OTHER; note = guanosine-3'-phosphate
  modified_base 19: mod_base = OTHER; note = guanosine-3'-phosphate
  misc_feature 1..19: note = RNA
  misc_feature 20..21: note = DNA
gctcttgttccgtgccaggtt

SEQ ID NO: 904 - DNA, 21 bp, synthetic construct
  source 1..21: mol_type = other DNA
  modified_base 1: mod_base = OTHER; note = cytidine-3'-phosphate
  modified_base 2: mod_base = OTHER; note = cytidine-3'-phosphate
  modified_base 3: mod_base = OTHER; note = uridine-3'-phosphate
  modified_base 4: mod_base = OTHER; note = guanosine-3'-phosphate
  modified_base 5: mod_base = OTHER; note = guanosine-3'-phosphate
  modified_base 6: mod_base = OTHER; note = cytidine-3'-phosphate
  modified_base 7: mod_base = OTHER; note = adenosine-3'-phosphate
  modified_base 8: mod_base = OTHER; note = cytidine-3'-phosphate
  modified_base 9: mod_base = OTHER; note = guanosine-3'-phosphate
  modified_base 10: mod_base = OTHER; note = guanosine-3'-phosphate
  modified_base 11: mod_base = OTHER; note = adenosine-3'-phosphate
  modified_base 12: mod_base = OTHER; note = adenosine-3'-phosphate
  modified_base 13: mod_base = OTHER; note = cytidine-3'-phosphate
  modified_base 14: mod_base = OTHER; note = adenosine-3'-phosphate
  modified_base 15: mod_base = OTHER; note = adenosine-3'-phosphate
  modified_base 16: mod_base = OTHER; note = guanosine-3'-phosphate
  modified_base 17: mod_base = OTHER; note = adenosine-3'-phosphate
  modified_base 18: mod_base = OTHER; note = guanosine-3'-phosphate
  modified_base 19: mod_base = OTHER; note = cytidine-3'-phosphate
  misc_feature 1..19: note = RNA
  misc_feature 20..21: note = DNA
cctggcacggaacaagagctt

SEQ ID NO: 905 - DNA, 21 bp, synthetic construct
  source 1..21: mol_type = other DNA
  modified_base 1: mod_base = OTHER; note = uridine-3'-phosphate
  modified_base 2: mod_base = OTHER; note = guanosine-3'-phosphate
  modified_base 3: mod_base = OTHER; note = uridine-3'-phosphate
  modified_base 4: mod_base = OTHER; note = uridine-3'-phosphate
  modified_base 5: mod_base = OTHER; note = cytidine-3'-phosphate
  modified_base 6: mod_base = OTHER; note = cytidine-3'-phosphate
  modified_base 7: mod_base = OTHER; note = guanosine-3'-phosphate
  modified_base 8: mod_base = OTHER; note = uridine-3'-phosphate
  modified_base 9: mod_base = OTHER; note = guanosine-3'-phosphate
  modified_base 10: mod_base = OTHER; note = cytidine-3'-phosphate
  modified_base 11: mod_base = OTHER; note = cytidine-3'-phosphate
  modified_base 12: mod_base = OTHER; note = adenosine-3'-phosphate
  modified_base 13: mod_base = OTHER; note = guanosine-3'-phosphate
  modified_base 14: mod_base = OTHER; note = guanosine-3'-phosphate
  modified_base 15: mod_base = OTHER; note = cytidine-3'-phosphate
  modified_base 16: mod_base = OTHER; note = adenosine-3'-phosphate
  modified_base 17: mod_base = OTHER; note = uridine-3'-phosphate
  modified_base 18: mod_base = OTHER; note = uridine-3'-phosphate
  modified_base 19: mod_base = OTHER; note = cytidine-3'-phosphate
  misc_feature 1..19: note = RNA
  misc_feature 20..21: note = DNA
tgttccgtgccaggcattctt

SEQ ID NO: 906 - DNA, 21 bp, synthetic construct
  source 1..21: mol_type = other DNA
  modified_base 1: mod_base = OTHER; note = guanosine-3'-phosphate
  modified_base 2: mod_base = OTHER; note = adenosine-3'-phosphate
  modified_base 3: mod_base = OTHER; note = adenosine-3'-phosphate
  modified_base 4: mod_base = OTHER; note = uridine-3'-phosphate
  modified_base 5: mod_base = OTHER; note = guanosine-3'-phosphate
  modified_base 6: mod_base = OTHER; note = cytidine-3'-phosphate
  modified_base 7: mod_base = OTHER; note = cytidine-3'-phosphate
  modified_base 8: mod_base = OTHER; note = uridine-3'-phosphate
  modified_base 9: mod_base = OTHER; note = guanosine-3'-phosphate
  modified_base 10: mod_base = OTHER; note = guanosine-3'-phosphate
  modified_base 11: mod_base = OTHER; note = cytidine-3'-phosphate
  modified_base 12: mod_base = OTHER; note = adenosine-3'-phosphate
  modified_base 13: mod_base = OTHER; note = cytidine-3'-phosphate
  modified_base 14: mod_base = OTHER; note = guanosine-3'-phosphate
  modified_base 15: mod_base = OTHER; note = guanosine-3'-phosphate
  modified_base 16: mod_base = OTHER; note = adenosine-3'-phosphate
  modified_base 17: mod_base = OTHER; note = adenosine-3'-phosphate
  modified_base 18: mod_base = OTHER; note = cytidine-3'-phosphate
  modified_base 19: mod_base = OTHER; note = adenosine-3'-phosphate
  misc_feature 1..19: note = RNA
  misc_feature 20..21: note = DNA
gaatgcctggcacggaacatt

SEQ ID NO: 907 - DNA, 21 bp, synthetic construct
  source 1..21: mol_type = other DNA
  modified_base 1: mod_base = OTHER; note = guanosine-3'-phosphate
  modified_base 2: mod_base = OTHER; note = uridine-3'-phosphate
  modified_base 3: mod_base = OTHER; note = uridine-3'-phosphate
  modified_base 4: mod_base = OTHER; note = cytidine-3'-phosphate
  modified_base 5: mod_base = OTHER; note = cytidine-3'-phosphate
  modified_base 6: mod_base = OTHER; note = guanosine-3'-phosphate
  modified_base 7: mod_base = OTHER; note = uridine-3'-phosphate
  modified_base 8: mod_base = OTHER; note = guanosine-3'-phosphate
  modified_base 9: mod_base = OTHER; note = cytidine-3'-phosphate
  modified_base 10: mod_base = OTHER; note = cytidine-3'-phosphate
  modified_base 11: mod_base = OTHER; note = adenosine-3'-phosphate
  modified_base 12: mod_base = OTHER; note = guanosine-3'-phosphate
  modified_base 13: mod_base = OTHER; note = guanosine-3'-phosphate
  modified_base 14: mod_base = OTHER; note = cytidine-3'-phosphate
  modified_base 15: mod_base = OTHER; note = adenosine-3'-phosphate
  modified_base 16: mod_base = OTHER; note = uridine-3'-phosphate
  modified_base 17: mod_base = OTHER; note = uridine-3'-phosphate
  modified_base 18: mod_base = OTHER; note = cytidine-3'-phosphate
  modified_base 19: mod_base = OTHER; note = adenosine-3'-phosphate
  misc_feature 1..19: note = RNA
  misc_feature 20..21: note = DNA
gttccgtgccaggcattcatt

SEQ ID NO: 908 - DNA, 21 bp, synthetic construct
  source 1..21: mol_type = other DNA
  modified_base 1: mod_base = OTHER; note = uridine-3'-phosphate
  modified_base 2: mod_base = OTHER; note = guanosine-3'-phosphate
  modified_base 3: mod_base = OTHER; note = adenosine-3'-phosphate
  modified_base 4: mod_base = OTHER; note = adenosine-3'-phosphate
  modified_base 5: mod_base = OTHER; note = uridine-3'-phosphate
  modified_base 6: mod_base = OTHER; note = guanosine-3'-phosphate
  modified_base 7: mod_base = OTHER; note = cytidine-3'-phosphate
  modified_base 8: mod_base = OTHER; note = cytidine-3'-phosphate
  modified_base 9: mod_base = OTHER; note = uridine-3'-phosphate
  modified_base 10: mod_base = OTHER; note = guanosine-3'-phosphate
  modified_base 11: mod_base = OTHER; note = guanosine-3'-phosphate
  modified_base 12: mod_base = OTHER; note = cytidine-3'-phosphate
  modified_base 13: mod_base = OTHER; note = adenosine-3'-phosphate
  modified_base 14: mod_base = OTHER; note = cytidine-3'-phosphate
  modified_base 15: mod_base = OTHER; note = guanosine-3'-phosphate
  modified_base 16: mod_base = OTHER; note = guanosine-3'-phosphate
  modified_base 17: mod_base = OTHER; note = adenosine-3'-phosphate
  modified_base 18: mod_base = OTHER; note = adenosine-3'-phosphate
  modified_base 19: mod_base = OTHER; note = cytidine-3'-phosphate
  misc_feature 1..19: note = RNA
  misc_feature 20..21: note = DNA
tgaatgcctggcacggaactt

SEQ ID NO: 909 - DNA, 21 bp, synthetic construct
  source 1..21: mol_type = other DNA
  modified_base 1: mod_base = OTHER; note = uridine-3'-phosphate
  modified_base 2: mod_base = OTHER; note = uridine-3'-phosphate
  modified_base 3: mod_base = OTHER; note = cytidine-3'-phosphate
  modified_base 4: mod_base = OTHER; note = cytidine-3'-phosphate
  modified_base 5: mod_base = OTHER; note = guanosine-3'-phosphate
  modified_base 6: mod_base = OTHER; note = uridine-3'-phosphate
  modified_base 7: mod_base = OTHER; note = guanosine-3'-phosphate
  modified_base 8: mod_base = OTHER; note = cytidine-3'-phosphate
  modified_base 9: mod_base = OTHER; note = cytidine-3'-phosphate
  modified_base 10: mod_base = OTHER; note = adenosine-3'-phosphate
  modified_base 11: mod_base = OTHER; note = guanosine-3'-phosphate
  modified_base 12: mod_base = OTHER; note = guanosine-3'-phosphate
  modified_base 13: mod_base = OTHER; note = cytidine-3'-phosphate
  modified_base 14: mod_base = OTHER; note = adenosine-3'-phosphate
  modified_base 15: mod_base = OTHER; note = uridine-3'-phosphate
  modified_base 16: mod_base = OTHER; note = uridine-3'-phosphate
  modified_base 17: mod_base = OTHER; note = cytidine-3'-phosphate
  modified_base 18: mod_base = OTHER; note = adenosine-3'-phosphate
  modified_base 19: mod_base = OTHER; note = adenosine-3'-phosphate
  misc_feature 1..19: note = RNA
  misc_feature 20..21: note = DNA
ttccgtgccaggcattcaatt

SEQ ID NO: 910 - DNA, 21 bp, synthetic construct
  source 1..21: mol_type = other DNA
  modified_base 1: mod_base = OTHER; note = uridine-3'-phosphate
  modified_base 2: mod_base = OTHER; note = uridine-3'-phosphate
  modified_base 3: mod_base = OTHER; note = guanosine-3'-phosphate
  modified_base 4: mod_base = OTHER; note = adenosine-3'-phosphate
  modified_base 5: mod_base = OTHER; note = adenosine-3'-phosphate
  modified_base 6: mod_base = OTHER; note = uridine-3'-phosphate
  modified_base 7: mod_base = OTHER; note = guanosine-3'-phosphate
  modified_base 8: mod_base = OTHER; note = cytidine-3'-phosphate
  modified_base 9: mod_base = OTHER; note = cytidine-3'-phosphate
  modified_base 10: mod_base = OTHER; note = uridine-3'-phosphate
  modified_base 11: mod_base = OTHER; note = guanosine-3'-phosphate
  modified_base 12: mod_base = OTHER; note = guanosine-3'-phosphate
  modified_base 13: mod_base = OTHER; note = cytidine-3'-phosphate
  modified_base 14: mod_base = OTHER; note = adenosine-3'-phosphate
  modified_base 15: mod_base = OTHER; note = cytidine-3'-phosphate
  modified_base 16: mod_base = OTHER; note = guanosine-3'-phosphate
  modified_base 17: mod_base = OTHER; note = guanosine-3'-phosphate
  modified_base 18: mod_base = OTHER; note = adenosine-3'-phosphate
  modified_base 19: mod_base = OTHER; note = adenosine-3'-phosphate
  misc_feature 1..19: note = RNA
  misc_feature 20..21: note = DNA
ttgaatgcctggcacggaatt

SEQ ID NO: 911 - DNA, 21 bp, synthetic construct
  source 1..21: mol_type = other DNA
  modified_base 1: mod_base = OTHER; note = cytidine-3'-phosphate
  modified_base 2: mod_base = OTHER; note = guanosine-3'-phosphate
  modified_base 3: mod_base = OTHER; note = uridine-3'-phosphate
  modified_base 4: mod_base = OTHER; note = guanosine-3'-phosphate
  modified_base 5: mod_base = OTHER; note = cytidine-3'-phosphate
  modified_base 6: mod_base = OTHER; note = cytidine-3'-phosphate
  modified_base 7: mod_base = OTHER; note = adenosine-3'-phosphate
  modified_base 8: mod_base = OTHER; note = guanosine-3'-phosphate
  modified_base 9: mod_base = OTHER; note = guanosine-3'-phosphate
  modified_base 10: mod_base = OTHER; note = cytidine-3'-phosphate
  modified_base 11: mod_base = OTHER; note = adenosine-3'-phosphate
  modified_base 12: mod_base = OTHER; note = uridine-3'-phosphate
  modified_base 13: mod_base = OTHER; note = uridine-3'-phosphate
  modified_base 14: mod_base = OTHER; note = cytidine-3'-phosphate
  modified_base 15: mod_base = OTHER; note = adenosine-3'-phosphate
  modified_base 16: mod_base = OTHER; note = adenosine-3'-phosphate
  modified_base 17: mod_base = OTHER; note = uridine-3'-phosphate
  modified_base 18: mod_base = OTHER; note = cytidine-3'-phosphate
  modified_base 19: mod_base = OTHER; note = cytidine-3'-phosphate
  misc_feature 1..19: note = RNA
  misc_feature 20..21: note = DNA
cgtgccaggcattcaatcctt

SEQ ID NO: 912 - DNA, 21 bp, synthetic construct
  source 1..21: mol_type = other DNA
  modified_base 1: mod_base = OTHER; note = guanosine-3'-phosphate
  modified_base 2: mod_base = OTHER; note = guanosine-3'-phosphate
  modified_base 3: mod_base = OTHER; note = adenosine-3'-phosphate
  modified_base 4: mod_base = OTHER; note = uridine-3'-phosphate
  modified_base 5: mod_base = OTHER; note = uridine-3'-phosphate
  modified_base 6: mod_base = OTHER; note = guanosine-3'-phosphate
  modified_base 7: mod_base = OTHER; note = adenosine-3'-phosphate
  modified_base 8: mod_base = OTHER; note = adenosine-3'-phosphate
  modified_base 9: mod_base = OTHER; note = uridine-3'-phosphate
  modified_base 10: mod_base = OTHER; note = guanosine-3'-phosphate
  modified_base 11: mod_base = OTHER; note = cytidine-3'-phosphate
  modified_base 12: mod_base = OTHER; note = cytidine-3'-phosphate
  modified_base 13: mod_base = OTHER; note = uridine-3'-phosphate
  modified_base 14: mod_base = OTHER; note = guanosine-3'-phosphate
  modified_base 15: mod_base = OTHER; note = guanosine-3'-phosphate
  modified_base 16: mod_base = OTHER; note = cytidine-3'-phosphate
  modified_base 17: mod_base = OTHER; note = adenosine-3'-phosphate
  modified_base 18: mod_base = OTHER; note = cytidine-3'-phosphate
  modified_base 19: mod_base = OTHER; note = guanosine-3'-phosphate
  misc_feature 1..19: note = RNA
  misc_feature 20..21: note = DNA
ggattgaatgcctggcacgtt

SEQ ID NO: 913 - DNA, 21 bp, synthetic construct
  source 1..21: mol_type = other DNA
  modified_base 1: mod_base = OTHER; note = guanosine-3'-phosphate
  modified_base 2: mod_base = OTHER; note = uridine-3'-phosphate
  modified_base 3: mod_base = OTHER; note = guanosine-3'-phosphate
  modified_base 4: mod_base = OTHER; note = cytidine-3'-phosphate
  modified_base 5: mod_base = OTHER; note = cytidine-3'-phosphate
  modified_base 6: mod_base = OTHER; note = adenosine-3'-phosphate
  modified_base 7: mod_base = OTHER; note = guanosine-3'-phosphate
  modified_base 8: mod_base = OTHER; note = guanosine-3'-phosphate
  modified_base 9: mod_base = OTHER; note = cytidine-3'-phosphate
  modified_base 10: mod_base = OTHER; note = adenosine-3'-phosphate
  modified_base 11: mod_base = OTHER; note = uridine-3'-phosphate
  modified_base 12: mod_base = OTHER; note = uridine-3'-phosphate
  modified_base 13: mod_base = OTHER; note = cytidine-3'-phosphate
  modified_base 14: mod_base = OTHER; note = adenosine-3'-phosphate
  modified_base 15: mod_base = OTHER; note = adenosine-3'-phosphate
  modified_base 16: mod_base = OTHER; note = uridine-3'-phosphate
  modified_base 17: mod_base = OTHER; note = cytidine-3'-phosphate
  modified_base 18: mod_base = OTHER; note = cytidine-3'-phosphate
  modified_base 19: mod_base = OTHER; note = uridine-3'-phosphate
  misc_feature 1..19: note = RNA
  misc_feature 20..21: note = DNA
gtgccaggcattcaatccttt

SEQ ID NO: 914 - DNA, 21 bp, synthetic construct
  source 1..21: mol_type = other DNA
  modified_base 1: mod_base = OTHER; note = adenosine-3'-phosphate
  modified_base 2: mod_base = OTHER; note = guanosine-3'-phosphate
  modified_base 3: mod_base = OTHER; note = guanosine-3'-phosphate
  modified_base 4: mod_base = OTHER; note = adenosine-3'-phosphate
  modified_base 5: mod_base = OTHER; note = uridine-3'-phosphate
  modified_base 6: mod_base = OTHER; note = uridine-3'-phosphate
  modified_base 7: mod_base = OTHER; note = guanosine-3'-phosphate
  modified_base 8: mod_base = OTHER; note = adenosine-3'-phosphate
  modified_base 9: mod_base = OTHER; note = adenosine-3'-phosphate
  modified_base 10: mod_base = OTHER; note = uridine-3'-phosphate
  modified_base 11: mod_base = OTHER; note = guanosine-3'-phosphate
  modified_base 12: mod_base = OTHER; note = cytidine-3'-phosphate
  modified_base 13: mod_base = OTHER; note = cytidine-3'-phosphate
  modified_base 14: mod_base = OTHER; note = uridine-3'-phosphate
  modified_base 15: mod_base = OTHER; note = guanosine-3'-phosphate
  modified_base 16: mod_base = OTHER; note = guanosine-3'-phosphate
  modified_base 17: mod_base = OTHER; note = cytidine-3'-phosphate
  modified_base 18: mod_base = OTHER; note = adenosine-3'-phosphate
  modified_base 19: mod_base = OTHER; note = cytidine-3'-phosphate
  misc_feature 1..19: note = RNA
  misc_feature 20..21: note = DNA
aggattgaatgcctggcactt

SEQ ID NO: 915 - DNA, 21 bp, synthetic construct
  source 1..21: mol_type = other DNA
  modified_base 1: mod_base = OTHER; note = cytidine-3'-phosphate
  modified_base 2: mod_base = OTHER; note = adenosine-3'-phosphate
  modified_base 3: mod_base = OTHER; note = adenosine-3'-phosphate
  modified_base 4: mod_base = OTHER; note = uridine-3'-phosphate
  modified_base 5: mod_base = OTHER; note = cytidine-3'-phosphate
  modified_base 6: mod_base = OTHER; note = cytidine-3'-phosphate
  modified_base 7: mod_base = OTHER; note = uridine-3'-phosphate
  modified_base 8: mod_base = OTHER; note = cytidine-3'-phosphate
  modified_base 9: mod_base = OTHER; note = adenosine-3'-phosphate
  modified_base 10: mod_base = OTHER; note = guanosine-3'-phosphate
  modified_base 11: mod_base = OTHER; note = guanosine-3'-phosphate
  modified_base 12: mod_base = OTHER; note = uridine-3'-phosphate
  modified_base 13: mod_base = OTHER; note = cytidine-3'-phosphate
  modified_base 14: mod_base = OTHER; note = uridine-3'-phosphate
  modified_base 15: mod_base = OTHER; note = cytidine-3'-phosphate
  modified_base 16: mod_base = OTHER; note = cytidine-3'-phosphate
  modified_base 17: mod_base = OTHER; note = adenosine-3'-phosphate
  modified_base 18: mod_base = OTHER; note = cytidine-3'-phosphate
  modified_base 19: mod_base = OTHER; note = cytidine-3'-phosphate
  misc_feature 1..19: note = RNA
  misc_feature 20..21: note = DNA
caatcctcaggtctccacctt

SEQ ID NO: 916 - DNA, 21 bp, synthetic construct
  source 1..21: mol_type = other DNA
  modified_base 1: mod_base = OTHER; note = guanosine-3'-phosphate
  modified_base 2: mod_base = OTHER; note = guanosine-3'-phosphate
  modified_base 3: mod_base = OTHER; note = uridine-3'-phosphate
  modified_base 4: mod_base = OTHER; note = guanosine-3'-phosphate
  modified_base 5: mod_base = OTHER; note = guanosine-3'-phosphate
  modified_base 6: mod_base = OTHER; note = adenosine-3'-phosphate
  modified_base 7: mod_base = OTHER; note = guanosine-3'-phosphate
  modified_base 8: mod_base = OTHER; note = adenosine-3'-phosphate
  modified_base 9: mod_base = OTHER; note = cytidine-3'-phosphate
  modified_base 10: mod_base = OTHER; note = cytidine-3'-phosphate
  modified_base 11: mod_base = OTHER; note = uridine-3'-phosphate
  modified_base 12: mod_base = OTHER; note = guanosine-3'-phosphate
  modified_base 13: mod_base = OTHER; note = adenosine-3'-phosphate
  modified_base 14: mod_base = OTHER; note = guanosine-3'-phosphate
  modified_base 15: mod_base = OTHER; note = guanosine-3'-phosphate
  modified_base 16: mod_base = OTHER; note = adenosine-3'-phosphate
  modified_base 17: mod_base = OTHER; note = uridine-3'-phosphate
  modified_base 18: mod_base = OTHER; note = uridine-3'-phosphate
  modified_base 19: mod_base = OTHER; note = guanosine-3'-phosphate
  misc_feature 1..19: note = RNA
  misc_feature 20..21: note = DNA
ggtggagacctgaggattgtt

SEQ ID NO: 917 - DNA, 21 bp, synthetic construct
  source 1..21: mol_type = other DNA
  modified_base 1: mod_base = OTHER; note = cytidine-3'-phosphate
  modified_base 2: mod_base = OTHER; note = adenosine-3'-phosphate
  modified_base 3: mod_base = OTHER; note = cytidine-3'-phosphate
  modified_base 4: mod_base = OTHER; note = cytidine-3'-phosphate
  modified_base 5: mod_base = OTHER; note = adenosine-3'-phosphate
  modified_base 6: mod_base = OTHER; note = adenosine-3'-phosphate
  modified_base 7: mod_base = OTHER; note = guanosine-3'-phosphate
  modified_base 8: mod_base = OTHER; note = guanosine-3'-phosphate
  modified_base 9: mod_base = OTHER; note = adenosine-3'-phosphate
  modified_base 10: mod_base = OTHER; note = guanosine-3'-phosphate
  modified_base 11: mod_base = OTHER; note = guanosine-3'-phosphate
  modified_base 12: mod_base = OTHER; note = cytidine-3'-phosphate
  modified_base 13: mod_base = OTHER; note = adenosine-3'-phosphate
  modified_base 14: mod_base = OTHER; note = guanosine-3'-phosphate
  modified_base 15: mod_base = OTHER; note = guanosine-3'-phosphate
  modified_base 16: mod_base = OTHER; note = adenosine-3'-phosphate
  modified_base 17: mod_base = OTHER; note = uridine-3'-phosphate
  modified_base 18: mod_base = OTHER; note = uridine-3'-phosphate
  modified_base 19: mod_base = OTHER; note = cytidine-3'-phosphate
  modified_base 20: mod_base = OTHER; note = 2'-deoxythymidine-3'-phosphorothioate
  misc_feature 1..19: note = RNA
  misc_feature 20..21: note = DNA
caccaaggaggcaggattctt

SEQ ID NO: 918 - DNA, 21 bp, synthetic construct
  source 1..21: mol_type = other DNA
  modified_base 1: mod_base = OTHER; note = guanosine-3'-phosphate
  modified_base 2: mod_base = OTHER; note = adenosine-3'-phosphate
  modified_base 3: mod_base = OTHER; note = adenosine-3'-phosphate
  modified_base 4: mod_base = OTHER; note = uridine-3'-phosphate
  modified_base 5: mod_base = OTHER; note = cytidine-3'-phosphate
  modified_base 6: mod_base = OTHER; note = cytidine-3'-phosphate
  modified_base 7: mod_base = OTHER; note = uridine-3'-phosphate
  modified_base 8: mod_base = OTHER; note = guanosine-3'-phosphate
  modified_base 9: mod_base = OTHER; note = cytidine-3'-phosphate
  modified_base 10: mod_base = OTHER; note = cytidine-3'-phosphate
  modified_base 11: mod_base = OTHER; note = uridine-3'-phosphate
  modified_base 12: mod_base = OTHER; note = cytidine-3'-phosphate
  modified_base 13: mod_base = OTHER; note = cytidine-3'-phosphate
  modified_base 14: mod_base = OTHER; note = uridine-3'-phosphate
  modified_base 15: mod_base = OTHER; note = uridine-3'-phosphate
  modified_base 16: mod_base = OTHER; note = guanosine-3'-phosphate
  modified_base 17: mod_base = OTHER; note = guanosine-3'-phosphate
  modified_base 18: mod_base = OTHER; note = uridine-3'-phosphate
  modified_base 19: mod_base = OTHER; note = guanosine-3'-phosphate
  modified_base 20: mod_base = OTHER; note = 2'-deoxythymidine-3'-phosphorothioate
  misc_feature 1..19: note = RNA
  misc_feature 20..21: note = DNA
gaatcctgcctccttggtgtt

SEQ ID NO: 919 - DNA, 21 bp, synthetic construct
  source 1..21: mol_type = other DNA
  modified_base 1: mod_base = OTHER; note = 2'-O-methylcytidine-3'-phosphate
  modified_base 2: mod_base = OTHER; note = adenosine-3'-phosphate
  modified_base 3: mod_base = OTHER; note = 2'-O-methylcytidine-3'-phosphate
  modified_base 4: mod_base = OTHER; note = 2'-O-methylcytidine-3'-phosphate
  modified_base 5: mod_base = OTHER; note = adenosine-3'-phosphate
  modified_base 6: mod_base = OTHER; note = adenosine-3'-phosphate
  modified_base 7: mod_base = OTHER; note = guanosine-3'-phosphate
  modified_base 8: mod_base = OTHER; note = guanosine-3'-phosphate
  modified_base 9: mod_base = OTHER; note = adenosine-3'-phosphate
  modified_base 10: mod_base = OTHER; note = guanosine-3'-phosphate
  modified_base 11: mod_base = OTHER; note = guanosine-3'-phosphate
  modified_base 12: mod_base = OTHER; note = 2'-O-methylcytidine-3'-phosphate
  modified_base 13: mod_base = OTHER; note = adenosine-3'-phosphate
  modified_base 14: mod_base = OTHER; note = guanosine-3'-phosphate
  modified_base 15: mod_base = OTHER; note = guanosine-3'-phosphate
  modified_base 16: mod_base = OTHER; note = adenosine-3'-phosphate
  modified_base 17: mod_base = OTHER; note = 2'-O-methyluridine-3'-phosphate
  modified_base 18: mod_base = OTHER; note = 2'-O-methyluridine-3'-phosphate
  modified_base 19: mod_base = OTHER; note = 2'-O-methylcytidine-3'-phosphate
  modified_base 20: mod_base = OTHER; note = 2'-deoxythymidine-3'-phosphorothioate
  misc_feature 1..19: note = RNA
  misc_feature 20..21: note = DNA
caccaaggaggcaggattctt

SEQ ID NO: 920 - DNA, 21 bp, synthetic construct
  source 1..21: mol_type = other DNA
  modified_base 1: mod_base = OTHER; note = guanosine-3'-phosphate
  modified_base 2: mod_base = OTHER; note = adenosine-3'-phosphate
  modified_base 3: mod_base = OTHER; note = adenosine-3'-phosphate
  modified_base 4: mod_base = OTHER; note = uridine-3'-phosphate
  modified_base 5: mod_base = OTHER; note = cytidine-3'-phosphate
  modified_base 6: mod_base = OTHER; note = cytidine-3'-phosphate
  modified_base 7: mod_base = OTHER; note = uridine-3'-phosphate
  modified_base 8: mod_base = OTHER; note = guanosine-3'-phosphate
  modified_base 9: mod_base = OTHER; note = cytidine-3'-phosphate
  modified_base 10: mod_base = OTHER; note = cytidine-3'-phosphate
  modified_base 11: mod_base = OTHER; note = uridine-3'-phosphate
  modified_base 12: mod_base = OTHER; note = cytidine-3'-phosphate
  modified_base 13: mod_base = OTHER; note = cytidine-3'-phosphate
  modified_base 14: mod_base = OTHER; note = uridine-3'-phosphate
  modified_base 15: mod_base = OTHER; note = uridine-3'-phosphate
  modified_base 16: mod_base = OTHER; note = guanosine-3'-phosphate
  modified_base 17: mod_base = OTHER; note = guanosine-3'-phosphate
  modified_base 18: mod_base = OTHER; note = uridine-3'-phosphate
  modified_base 19: mod_base = OTHER; note = guanosine-3'-phosphate
  modified_base 20: mod_base = OTHER; note = 2'-deoxythymidine-3'-phosphorothioate
  misc_feature 1..19: note = RNA
  misc_feature 20..21: note = DNA
gaatcctgcctccttggtgtt

SEQ ID NO: 921 - DNA, 21 bp, synthetic construct
  source 1..21: mol_type = other DNA
  modified_base 1: mod_base = OTHER; note = 2'-deoxy-2'-fluorocytidine-3'-phosphate
  modified_base 2: mod_base = OTHER; note = 2'-O-methyladenosine-3'-phosphate
  modified_base 3: mod_base = OTHER; note = 2'-deoxy-2'-fluorocytidine-3'-phosphate
  modified_base 4: mod_base = OTHER; note = 2'-O-methylcytidine-3'-phosphate
  modified_base 5: mod_base = OTHER; note = 2'-deoxy-2'-fluoroadenosine-3'-phosphate
  modified_base 6: mod_base = OTHER; note = 2'-O-methyladenosine-3'-phosphate
  modified_base 7: mod_base = OTHER; note = 2'-deoxy-2'-fluoroguanosine-3'-phosphate
  modified_base 8: mod_base = OTHER; note = 2'-O-methylguanosine-3'-phosphate
  modified_base 9: mod_base = OTHER; note = 2'-deoxy-2'-fluoroadenosine-3'-phosphate
  modified_base 10: mod_base = OTHER; note = 2'-O-methylguanosine-3'-phosphate
  modified_base 11: mod_base = OTHER; note = 2'-deoxy-2'-fluoroguanosine-3'-phosphate
  modified_base 12: mod_base = OTHER; note = 2'-O-methylcytidine-3'-phosphate
  modified_base 13: mod_base = OTHER; note = 2'-deoxy-2'-fluoroadenosine-3'-phosphate
  modified_base 14: mod_base = OTHER; note = 2'-O-methylguanosine-3'-phosphate
  modified_base 15: mod_base = OTHER; note = 2'-deoxy-2'-fluoroguanosine-3'-phosphate
  modified_base 16: mod_base = OTHER; note = 2'-O-methyladenosine-3'-phosphate
  modified_base 17: mod_base = OTHER; note = 2'-deoxy-2'-fluorouridine-3'-phosphate
  modified_base 18: mod_base = OTHER; note = 2'-O-methyluridine-3'-phosphate
  modified_base 19: mod_base = OTHER; note = 2'-deoxy-2'-fluorocytidine-3'-phosphate
  modified_base 20: mod_base = OTHER; note = 2'-deoxythymidine-3'-phosphorothioate
  misc_feature 1..19: note = RNA
  misc_feature 20..21: note = DNA
caccaaggaggcaggattctt

SEQ ID NO: 922 - DNA, 21 bp, synthetic construct
  source 1..21: mol_type = other DNA
  modified_base 1: mod_base = OTHER; note = 2'-O-methylguanosine-3'-phosphate 5'phosphate
  modified_base 2: mod_base = OTHER; note = 2'-deoxy-2'-fluoroadenosine-3'-phosphate
  modified_base 3: mod_base = OTHER; note = 2'-O-methyladenosine-3'-phosphate
  modified_base 4: mod_base = OTHER; note = 2'-deoxy-2'-fluorouridine-3'-phosphate
  modified_base 5: mod_base = OTHER; note = 2'-O-methylcytidine-3'-phosphate
  modified_base 6: mod_base = OTHER; note = 2'-deoxy-2'-fluorocytidine-3'-phosphate
  modified_base 7: mod_base = OTHER; note = 2'-O-methyluridine-3'-phosphate
  modified_base 8: mod_base = OTHER; note = 2'-deoxy-2'-fluoroguanosine-3'-phosphate
  modified_base 9: mod_base = OTHER; note = 2'-O-methylcytidine-3'-phosphate
  modified_base 10: mod_base = OTHER; note = 2'-deoxy-2'-fluorocytidine-3'-phosphate
  modified_base 11: mod_base = OTHER; note = 2'-O-methyluridine-3'-phosphate
  modified_base 12: mod_base = OTHER; note = 2'-deoxy-2'-fluorocytidine-3'-phosphate
  modified_base 13: mod_base = OTHER; note = 2'-O-methylcytidine-3'-phosphate
  modified_base 14: mod_base = OTHER; note = 2'-deoxy-2'-fluorouridine-3'-phosphate
  modified_base 15: mod_base = OTHER; note = 2'-O-methyluridine-3'-phosphate
  modified_base 16: mod_base = OTHER; note = 2'-deoxy-2'-fluoroguanosine-3'-phosphate
  modified_base 17: mod_base = OTHER; note = 2'-O-methylguanosine-3'-phosphate
  modified_base 18: mod_base = OTHER; note = 2'-deoxy-2'-fluorouridine-3'-phosphate
  modified_base 19: mod_base = OTHER; note = 2'-O-methylguanosine-3'-phosphate
  modified_base 20: mod_base = OTHER; note = 2'-deoxythymidine-3'-phosphorothioate
  misc_feature 1..19: note = RNA
  misc_feature 20..21: note = DNA
gaatcctgcctccttggtgtt

SEQ ID NO: 923 - DNA, 21 bp, synthetic construct
  source 1..21: mol_type = other DNA
  modified_base 1: mod_base = OTHER; note = 2'-deoxy-2'-fluorocytidine-3'-phosphate
  modified_base 2: mod_base = OTHER; note = adenosine-3'-phosphate
  modified_base 3: mod_base = OTHER; note = 2'-deoxy-2'-fluorocytidine-3'-phosphate
  modified_base 4: mod_base = OTHER; note = 2'-deoxy-2'-fluorocytidine-3'-phosphate
  modified_base 5: mod_base = OTHER; note = adenosine-3'-phosphate
  modified_base 6: mod_base = OTHER; note = adenosine-3'-phosphate
  modified_base 7: mod_base = OTHER; note = guanosine-3'-phosphate
  modified_base 8: mod_base = OTHER; note = guanosine-3'-phosphate
  modified_base 9: mod_base = OTHER; note = adenosine-3'-phosphate
  modified_base 10: mod_base = OTHER; note = guanosine-3'-phosphate
  modified_base 11: mod_base = OTHER; note = guanosine-3'-phosphate
  modified_base 12: mod_base = OTHER; note = 2'-deoxy-2'-fluorocytidine-3'-phosphate
  modified_base 13: mod_base = OTHER; note = adenosine-3'-phosphate
  modified_base 14: mod_base = OTHER; note = guanosine-3'-phosphate
  modified_base 15: mod_base = OTHER; note = guanosine-3'-phosphate
  modified_base 16: mod_base = OTHER; note = adenosine-3'-phosphate
  modified_base 17: mod_base = OTHER; note = 2'-deoxy-2'-fluorouridine-3'-phosphate
  modified_base 18: mod_base = OTHER; note = 2'-deoxy-2'-fluorouridine-3'-phosphate
  modified_base 19: mod_base = OTHER; note = 2'-deoxy-2'-fluorocytidine-3'-phosphate
  modified_base 20: mod_base = OTHER; note = 2'-deoxythymidine-3'-phosphorothioate
  misc_feature 1..19: note = RNA
  misc_feature 20..21: note = DNA
caccaaggaggcaggattctt

SEQ ID NO: 924 - DNA, 21 bp, synthetic construct
  source 1..21: mol_type = other DNA
  modified_base 1: mod_base = OTHER; note = guanosine-3'-phosphate
  modified_base 2: mod_base = OTHER; note = adenosine-3'-phosphate
  modified_base 3: mod_base = OTHER; note = adenosine-3'-phosphate
  modified_base 4: mod_base = OTHER; note = 2'-deoxy-2'-fluorouridine-3'-phosphate
  modified_base 5: mod_base = OTHER; note = 2'-deoxy-2'-fluorocytidine-3'-phosphate
  modified_base 6: mod_base = OTHER; note = 2'-deoxy-2'-fluorocytidine-3'-phosphate
  modified_base 7: mod_base = OTHER; note = 2'-deoxy-2'-fluorouridine-3'-phosphate
  modified_base 8: mod_base = OTHER; note = guanosine-3'-phosphate
  modified_base 9: mod_base = OTHER; note = 2'-deoxy-2'-fluorocytidine-3'-phosphate
  modified_base 10: mod_base = OTHER; note = 2'-deoxy-2'-fluorocytidine-3'-phosphate
  modified_base 11: mod_base = OTHER; note = 2'-deoxy-2'-fluorouridine-3'-phosphate
  modified_base 12: mod_base = OTHER; note = 2'-deoxy-2'-fluorocytidine-3'-phosphate
  modified_base 13: mod_base = OTHER; note = 2'-deoxy-2'-fluorocytidine-3'-phosphate
  modified_base 14: mod_base = OTHER; note = 2'-deoxy-2'-fluorouridine-3'-phosphate
  modified_base 15: mod_base = OTHER; note = 2'-deoxy-2'-fluorouridine-3'-phosphate
  modified_base 16: mod_base = OTHER; note = guanosine-3'-phosphate
  modified_base 17: mod_base = OTHER; note = guanosine-3'-phosphate
  modified_base 18: mod_base = OTHER; note = 2'-deoxy-2'-fluorouridine-3'-phosphate
  modified_base 19: mod_base = OTHER; note = guanosine-3'-phosphate
  modified_base 20: mod_base = OTHER; note = 2'-deoxythymidine-3'-phosphorothioate
  misc_feature 1..19: note = RNA
  misc_feature 20..21: note = DNA
gaatcctgcctccttggtgtt

SEQ ID NO: 925 - DNA, 21 bp, synthetic construct
  source 1..21: mol_type = other DNA
  modified_base 1: mod_base = OTHER; note = cytidine-3'-phosphate
  modified_base 2: mod_base = OTHER; note = 2'-O-methyladenosine-3'-phosphate
  modified_base 3: mod_base = OTHER; note = cytidine-3'-phosphate
  modified_base 4: mod_base = OTHER; note = 2'-O-methylcytidine-3'-phosphate
  modified_base 5: mod_base = OTHER; note = adenosine-3'-phosphate
  modified_base 6: mod_base = OTHER; note = 2'-O-methyladenosine-3'-phosphate
  modified_base 7: mod_base = OTHER; note = guanosine-3'-phosphate
  modified_base 8: mod_base = OTHER; note = 2'-O-methylguanosine-3'-phosphate
  modified_base 9: mod_base = OTHER; note = adenosine-3'-phosphate
  modified_base 10: mod_base = OTHER; note = 2'-O-methylguanosine-3'-phosphate
  modified_base 11: mod_base = OTHER; note = guanosine-3'-phosphate
  modified_base 12: mod_base = OTHER; note = 2'-O-methylcytidine-3'-phosphate
  modified_base 13: mod_base = OTHER; note = adenosine-3'-phosphate
  modified_base 14: mod_base = OTHER; note = 2'-O-methylguanosine-3'-phosphate
  modified_base 15: mod_base = OTHER; note = guanosine-3'-phosphate
  modified_base 16: mod_base = OTHER; note = 2'-O-methyladenosine-3'-phosphate
  modified_base 17: mod_base = OTHER; note = uridine-3'-phosphate
  modified_base 18: mod_base = OTHER; note = 2'-O-methyluridine-3'-phosphate
  modified_base 19: mod_base = OTHER; note = cytidine-3'-phosphate
  modified_base 20: mod_base = OTHER; note = 2'-deoxythymidine-3'-phosphorothioate
  misc_feature 1..19: note = RNA
  misc_feature 20..21: note = DNA
caccaaggaggcaggattctt

SEQ ID NO: 926 - DNA, 21 bp, synthetic construct
  source 1..21: mol_type = other DNA
  modified_base 1: mod_base = OTHER; note = 2'-O-methylguanosine-3'-phosphate 5'phosphate
  modified_base 2: mod_base = OTHER; note = 2'-deoxy-2'-fluoroadenosine-3'-phosphate
  modified_base 3: mod_base = OTHER; note = 2'-O-methyladenosine-3'-phosphate
  modified_base 4: mod_base = OTHER; note = 2'-deoxy-2'-fluorouridine-3'-phosphate
  modified_base 5: mod_base = OTHER; note = 2'-O-methylcytidine-3'-phosphate
  modified_base 6: mod_base = OTHER; note = 2'-deoxy-2'-fluorocytidine-3'-phosphate
  modified_base 7: mod_base = OTHER; note = 2'-O-methyluridine-3'-phosphate
  modified_base 8: mod_base = OTHER; note = 2'-deoxy-2'-fluoroguanosine-3'-phosphate
  modified_base 9: mod_base = OTHER; note = 2'-O-methylcytidine-3'-phosphate
  modified_base 10: mod_base = OTHER; note = 2'-deoxy-2'-fluorocytidine-3'-phosphate
  modified_base 11: mod_base = OTHER; note = 2'-O-methyluridine-3'-phosphate
  modified_base 12: mod_base = OTHER; note = 2'-deoxy-2'-fluorocytidine-3'-phosphate
  modified_base 13: mod_base = OTHER; note = 2'-O-methylcytidine-3'-phosphate
  modified_base 14: mod_base = OTHER; note = 2'-deoxy-2'-fluorouridine-3'-phosphate
  modified_base 15: mod_base = OTHER; note = 2'-O-methyluridine-3'-phosphate
  modified_base 16: mod_base = OTHER; note = 2'-deoxy-2'-fluoroguanosine-3'-phosphate
  modified_base 17: mod_base = OTHER; note = 2'-O-methylguanosine-3'-phosphate
  modified_base 18: mod_base = OTHER; note = 2'-deoxy-2'-fluorouridine-3'-phosphate
  modified_base 19: mod_base = OTHER; note = 2'-O-methylguanosine-3'-phosphate
  modified_base 20: mod_base = OTHER; note = 2'-deoxythymidine-3'-phosphorothioate
  misc_feature 1..19: note = RNA
  misc_feature 20..21: note = DNA
gaatcctgcctccttggtgtt

SEQ ID NO: 927 - DNA, 21 bp, synthetic construct
  source 1..21: mol_type = other DNA
  modified_base 1: mod_base = OTHER; note = cytidine-3'-phosphate
  modified_base 2: mod_base = OTHER; note = 2'-O-methyladenosine-3'-phosphate
  modified_base 3: mod_base = OTHER; note = cytidine-3'-phosphate
  modified_base 4: mod_base = OTHER; note = 2'-O-methylcytidine-3'-phosphate
  modified_base 5: mod_base = OTHER; note = adenosine-3'-phosphate
  modified_base 6: mod_base = OTHER; note = 2'-O-methyladenosine-3'-phosphate
  modified_base 7: mod_base = OTHER; note = guanosine-3'-phosphate
  modified_base 8: mod_base = OTHER; note = 2'-O-methylguanosine-3'-phosphate
  modified_base 9: mod_base = OTHER; note = adenosine-3'-phosphate
  modified_base 10: mod_base = OTHER; note = 2'-O-methylguanosine-3'-phosphate
  modified_base 11: mod_base = OTHER; note = guanosine-3'-phosphate
  modified_base 12: mod_base = OTHER; note = 2'-O-methylcytidine-3'-phosphate
  modified_base 13: mod_base = OTHER; note = adenosine-3'-phosphate
  modified_base 14: mod_base = OTHER; note = 2'-O-methylguanosine-3'-phosphate
  modified_base 15: mod_base = OTHER; note = guanosine-3'-phosphate
  modified_base 16: mod_base = OTHER; note = 2'-O-methyladenosine-3'-phosphate
  modified_base 17: mod_base = OTHER; note = uridine-3'-phosphate
  modified_base 18: mod_base = OTHER; note = 2'-O-methyluridine-3'-phosphate
  modified_base 19: mod_base = OTHER; note = cytidine-3'-phosphate
  modified_base 20: mod_base = OTHER; note = 2'-deoxythymidine-3'-phosphorothioate
  misc_feature 1..19: note = RNA
  misc_feature 20..21: note = DNA
caccaaggaggcaggattctt

SEQ ID NO: 928 - DNA, 21 bp, synthetic construct
  source 1..21: mol_type = other DNA
  modified_base 1: mod_base = OTHER; note = guanosine-3'-phosphate
  modified_base 2: mod_base = OTHER; note = adenosine-3'-phosphate
  modified_base 3: mod_base = OTHER; note = adenosine-3'-phosphate
  modified_base 4: mod_base = OTHER; note = 2'-deoxy-2'-fluorouridine-3'-phosphate
  modified_base 5: mod_base = OTHER; note = 2'-deoxy-2'-fluorocytidine-3'-phosphate
  modified_base 6: mod_base = OTHER; note = 2'-deoxy-2'-fluorocytidine-3'-phosphate
  modified_base 7: mod_base = OTHER; note = 2'-deoxy-2'-fluorouridine-3'-phosphate
  modified_base 8: mod_base = OTHER; note = guanosine-3'-phosphate
  modified_base 9: mod_base = OTHER; note = 2'-deoxy-2'-fluorocytidine-3'-phosphate
  modified_base 10: mod_base = OTHER; note = 2'-deoxy-2'-fluorocytidine-3'-phosphate
  modified_base 11: mod_base = OTHER; note = 2'-deoxy-2'-fluorouridine-3'-phosphate
  modified_base 12: mod_base = OTHER; note = 2'-deoxy-2'-fluorocytidine-3'-phosphate
  modified_base 13: mod_base = OTHER; note = 2'-deoxy-2'-fluorocytidine-3'-phosphate
  modified_base 14: mod_base = OTHER; note = 2'-deoxy-2'-fluorouridine-3'-phosphate
  modified_base 15: mod_base = OTHER; note = 2'-deoxy-2'-fluorouridine-3'-phosphate
  modified_base 16: mod_base = OTHER; note = guanosine-3'-phosphate
  modified_base 17: mod_base = OTHER; note = guanosine-3'-phosphate
  modified_base 18: mod_base = OTHER; note = 2'-deoxy-2'-fluorouridine-3'-phosphate
  modified_base 19: mod_base = OTHER; note = guanosine-3'-phosphate
  modified_base 20: mod_base = OTHER; note = 2'-deoxythymidine-3'-phosphorothioate
  misc_feature 1..19: note = RNA
  misc_feature 20..21: note = DNA
gaatcctgcctccttggtgtt

SEQ ID NO: 929 - DNA, 21 bp, synthetic construct
  source 1..21: mol_type = other DNA
  modified_base 1: mod_base = OTHER; note = 2'-deoxy-2'-fluorocytidine-3'-phosphate
  modified_base 2: mod_base = OTHER; note = 2'-O-methyladenosine-3'-phosphate
  modified_base 3: mod_base = OTHER; note = 2'-deoxy-2'-fluorocytidine-3'-phosphate
  modified_base 4: mod_base = OTHER; note = 2'-O-methylcytidine-3'-phosphate
  modified_base 5: mod_base = OTHER; note = 2'-deoxy-2'-fluoroadenosine-3'-phosphate
  modified_base 6: mod_base = OTHER; note = 2'-O-methyladenosine-3'-phosphate
  modified_base 7: mod_base = OTHER; note = 2'-deoxy-2'-fluoroguanosine-3'-phosphate
  modified_base 8: mod_base = OTHER; note = 2'-O-methylguanosine-3'-phosphate
  modified_base 9: mod_base = OTHER; note = 2'-deoxy-2'-fluoroadenosine-3'-phosphate
  modified_base 10: mod_base = OTHER; note = 2'-O-methylguanosine-3'-phosphate
  modified_base 11: mod_base = OTHER; note = 2'-deoxy-2'-fluoroguanosine-3'-phosphate
  modified_base 12: mod_base = OTHER; note = 2'-O-methylcytidine-3'-phosphate
  modified_base 13: mod_base = OTHER; note = 2'-deoxy-2'-fluoroadenosine-3'-phosphate
  modified_base 14: mod_base = OTHER; note = 2'-O-methylguanosine-3'-phosphate
  modified_base 15: mod_base = OTHER; note = 2'-deoxy-2'-fluoroguanosine-3'-phosphate
  modified_base 16: mod_base = OTHER; note = 2'-O-methyladenosine-3'-phosphate
  modified_base 17: mod_base = OTHER; note = 2'-deoxy-2'-fluorouridine-3'-phosphate
  modified_base 18: mod_base = OTHER; note = 2'-O-methyluridine-3'-phosphate
  modified_base 19: mod_base = OTHER; note = 2'-deoxy-2'-fluorocytidine-3'-phosphate
  modified_base 20: mod_base = OTHER; note = 2'-deoxythymidine-3'-phosphorothioate
  misc_feature 1..19: note = RNA
  misc_feature 20..21: note = DNA
caccaaggaggcaggattctt

SEQ ID NO: 930 - DNA, 21 bp, synthetic construct
  source 1..21: mol_type = other DNA
  modified_base 1: mod_base = OTHER; note = guanosine-3'-phosphate
  modified_base 2: mod_base = OTHER; note = adenosine-3'-phosphate
  modified_base 3: mod_base = OTHER; note = adenosine-3'-phosphate
  modified_base 4: mod_base = OTHER; note = uridine-3'-phosphate
  modified_base 5: mod_base = OTHER; note = cytidine-3'-phosphate
  modified_base 6: mod_base = OTHER; note = 2'-O-methylcytidine-3'-phosphate
  modified_base 7: mod_base = OTHER; note = 2'-O-methyluridine-3'-phosphate
  modified_base 8: mod_base = OTHER; note = guanosine-3'-phosphate
  modified_base 9: mod_base = OTHER; note = cytidine-3'-phosphate
  modified_base 10: mod_base = OTHER; note = 2'-O-methylcytidine-3'-phosphate
  modified_base 11: mod_base = OTHER; note = 2'-O-methyluridine-3'-phosphate
  modified_base 12: mod_base = OTHER; note = cytidine-3'-phosphate
  modified_base 13: mod_base = OTHER; note = cytidine-3'-phosphate
  modified_base 14: mod_base = OTHER; note = uridine-3'-phosphate
  modified_base 15: mod_base = OTHER; note = uridine-3'-phosphate
  modified_base 16: mod_base = OTHER; note = guanosine-3'-phosphate
  modified_base 17: mod_base = OTHER; note = 2'-O-methylguanosine-3'-phosphate
  modified_base 18: mod_base = OTHER; note = 2'-O-methyluridine-3'-phosphate
  modified_base 19: mod_base = OTHER; note = 2'-O-methylguanosine-3'-phosphate
  modified_base 20: mod_base = OTHER; note = 2'-deoxythymidine-3'-phosphorothioate
  misc_feature 1..19: note = RNA
  misc_feature 20..21: note = DNA
gaatcctgcctccttggtgtt

SEQ ID NO: 931 - DNA, 21 bp, synthetic construct
  source 1..21: mol_type = other DNA
  modified_base 1: mod_base = OTHER; note = 2'-deoxy-2'-fluorocytidine-3'-phosphate
  modified_base 2: mod_base = OTHER; note = adenosine-3'-phosphate
  modified_base 3: mod_base = OTHER; note = 2'-deoxy-2'-fluorocytidine-3'-phosphate
  modified_base 4: mod_base = OTHER; note = 2'-deoxy-2'-fluorocytidine-3'-phosphate
  modified_base 5: mod_base = OTHER; note = adenosine-3'-phosphate
  modified_base 6: mod_base = OTHER; note = adenosine-3'-phosphate
  modified_base 7: mod_base = OTHER; note = guanosine-3'-phosphate
  modified_base 8: mod_base = OTHER; note = guanosine-3'-phosphate
  modified_base 9: mod_base = OTHER; note = adenosine-3'-phosphate
  modified_base 10: mod_base = OTHER; note = guanosine-3'-phosphate
  modified_base 11: mod_base = OTHER; note = guanosine-3'-phosphate
  modified_base 12: mod_base = OTHER; note = 2'-deoxy-2'-fluorocytidine-3'-phosphate
  modified_base 13: mod_base = OTHER; note = adenosine-3'-phosphate
  modified_base 14: mod_base = OTHER; note = guanosine-3'-phosphate
  modified_base 15: mod_base = OTHER; note = guanosine-3'-phosphate
  modified_base 16: mod_base = OTHER; note = adenosine-3'-phosphate
  modified_base 17: mod_base = OTHER; note = 2'-deoxy-2'-fluorouridine-3'-phosphate
  modified_base 18: mod_base = OTHER; note = 2'-deoxy-2'-fluorouridine-3'-phosphate
  modified_base 19: mod_base = OTHER; note = 2'-deoxy-2'-fluorocytidine-3'-phosphate
  modified_base 20: mod_base = OTHER; note = 2'-deoxythymidine-3'-phosphorothioate
  misc_feature 1..19: note = RNA
  misc_feature 20..21: note = DNA
caccaaggaggcaggattctt

SEQ ID NO: 932 - DNA, 21 bp, synthetic construct
  source 1..21: mol_type = other DNA
  modified_base 1: mod_base = OTHER; note = guanosine-3'-phosphate
  modified_base 2: mod_base = OTHER; note = adenosine-3'-phosphate
  modified_base 3: mod_base = OTHER; note = adenosine-3'-phosphate
  modified_base 4: mod_base = OTHER; note = uridine-3'-phosphate
  modified_base 5: mod_base = OTHER; note = cytidine-3'-phosphate
  modified_base 6: mod_base = OTHER; note = 2'-O-methylcytidine-3'-phosphate
  modified_base 7: mod_base = OTHER; note = 2'-O-methyluridine-3'-phosphate
  modified_base 8: mod_base = OTHER; note = guanosine-3'-phosphate
  modified_base 9: mod_base = OTHER; note = cytidine-3'-phosphate
  modified_base 10: mod_base = OTHER; note = 2'-O-methylcytidine-3'-phosphate
  modified_base 11: mod_base = OTHER; note = 2'-O-methyluridine-3'-phosphate
  modified_base 12: mod_base = OTHER; note = cytidine-3'-phosphate
  modified_base 13: mod_base = OTHER; note = cytidine-3'-phosphate
  modified_base 14: mod_base = OTHER; note = uridine-3'-phosphate
  modified_base 15: mod_base = OTHER; note = uridine-3'-phosphate
  modified_base 16: mod_base = OTHER; note = guanosine-3'-phosphate
  modified_base 17: mod_base = OTHER; note = 2'-O-methylguanosine-3'-phosphate
  modified_base 18: mod_base = OTHER; note = 2'-O-methyluridine-3'-phosphate
  modified_base 19: mod_base = OTHER; note = 2'-O-methylguanosine-3'-phosphate
  modified_base 20: mod_base = OTHER; note = 2'-deoxythymidine-3'-phosphorothioate
  misc_feature 1..19: note = RNA
  misc_feature 20..21: note = DNA
gaatcctgcctccttggtgtt

SEQ ID NO: 933 - DNA, 21 bp, synthetic construct
  source 1..21: mol_type = other DNA
  modified_base 1: mod_base = OTHER; note = cytidine-3'-phosphate
  modified_base 2: mod_base = OTHER; note = 2'-O-methyladenosine-3'-phosphate
  modified_base 3: mod_base = OTHER; note = cytidine-3'-phosphate
  modified_base 4: mod_base = OTHER; note = 2'-O-methylcytidine-3'-phosphate
  modified_base 5: mod_base = OTHER; note = adenosine-3'-phosphate
  modified_base 6: mod_base = OTHER; note = 2'-O-methyladenosine-3'-phosphate
  modified_base 7: mod_base = OTHER; note = guanosine-3'-phosphate
  modified_base 8: mod_base = OTHER; note = 2'-O-methylguanosine-3'-phosphate
  modified_base 9: mod_base = OTHER; note = adenosine-3'-phosphate
  modified_base 10: mod_base = OTHER; note = 2'-O-methylguanosine-3'-phosphate
  modified_base 11: mod_base = OTHER; note = guanosine-3'-phosphate
  modified_base 12: mod_base = OTHER; note = 2'-O-methylcytidine-3'-phosphate
  modified_base 13: mod_base = OTHER; note = adenosine-3'-phosphate
  modified_base 14: mod_base = OTHER; note = 2'-O-methylguanosine-3'-phosphate
  modified_base 15: mod_base = OTHER; note = guanosine-3'-phosphate
  modified_base 16: mod_base = OTHER; note = 2'-O-methyladenosine-3'-phosphate
  modified_base 17: mod_base = OTHER; note = uridine-3'-phosphate
  modified_base 18: mod_base = OTHER; note = 2'-O-methyluridine-3'-phosphate
  modified_base 19: mod_base = OTHER; note = cytidine-3'-phosphate
  modified_base 20: mod_base = OTHER; note = 2'-deoxythymidine-3'-phosphorothioate
  misc_feature 1..19: note = RNA
  misc_feature 20..21: note = DNA
caccaaggaggcaggattctt

SEQ ID NO: 934 - DNA, 21 bp, synthetic construct
  source 1..21: mol_type = other DNA
  modified_base 1: mod_base = OTHER; note = guanosine-3'-phosphate
  modified_base 2: mod_base = OTHER; note = adenosine-3'-phosphate
  modified_base 3: mod_base = OTHER; note = adenosine-3'-phosphate
  modified_base 4: mod_base = OTHER; note = uridine-3'-phosphate
  modified_base 5: mod_base = OTHER; note = cytidine-3'-phosphate
  modified_base 6: mod_base = OTHER; note = 2'-O-methylcytidine-3'-phosphate
  modified_base 7: mod_base = OTHER; note = 2'-O-methyluridine-3'-phosphate
  modified_base 8: mod_base = OTHER; note = guanosine-3'-phosphate
  modified_base 9: mod_base = OTHER; note = cytidine-3'-phosphate
  modified_base 10: mod_base = OTHER; note = 2'-O-methylcytidine-3'-phosphate
  modified_base 11: mod_base = OTHER; note = 2'-O-methyluridine-3'-phosphate
  modified_base 12: mod_base = OTHER; note = cytidine-3'-phosphate
  modified_base 13: mod_base = OTHER; note = cytidine-3'-phosphate
  modified_base 14: mod_base = OTHER; note = uridine-3'-phosphate
  modified_base 15: mod_base = OTHER; note = uridine-3'-phosphate
  modified_base 16: mod_base = OTHER; note = guanosine-3'-phosphate
  modified_base 17: mod_base = OTHER; note = 2'-O-methylguanosine-3'-phosphate
  modified_base 18: mod_base = OTHER; note = 2'-O-methyluridine-3'-phosphate
  modified_base 19: mod_base = OTHER; note = 2'-O-methylguanosine-3'-phosphate
  modified_base 20: mod_base = OTHER; note = 2'-deoxythymidine-3'-phosphorothioate
  misc_feature 1..19: note = RNA
  misc_feature 20..21: note = DNA
gaatcctgcctccttggtgtt

SEQ ID NO: 935 - DNA, 21 bp, synthetic construct
  source 1..21: mol_type = other DNA
  modified_base 1: mod_base = OTHER; note = 2'-deoxy-2'-fluoroguanosine-3'-phosphate
  modified_base 2: mod_base = OTHER; note = 2'-O-methylguanosine-3'-phosphate
  modified_base 3: mod_base = OTHER; note = 2'-deoxy-2'-fluorocytidine-3'-phosphate
  modified_base 4: mod_base = OTHER; note = 2'-O-methylcytidine-3'-phosphate
  modified_base 5: mod_base = OTHER; note = 2'-deoxy-2'-fluorouridine-3'-phosphate
  modified_base 6: mod_base = OTHER; note = 2'-O-methylguanosine-3'-phosphate
  modified_base 7: mod_base = OTHER; note = 2'-deoxy-2'-fluoroguanosine-3'-phosphate
  modified_base 8: mod_base = OTHER; note = 2'-O-methyladenosine-3'-phosphate
  modified_base 9: mod_base = OTHER; note = 2'-deoxy-2'-fluoroguanosine-3'-phosphate
  modified_base 10: mod_base = OTHER; note = 2'-O-methyluridine-3'-phosphate
  modified_base 11: mod_base = OTHER; note = 2'-deoxy-2'-fluorouridine-3'-phosphate
  modified_base 12: mod_base = OTHER; note = 2'-O-methyluridine-3'-phosphate
  modified_base 13: mod_base = OTHER; note = 2'-deoxy-2'-fluoroadenosine-3'-phosphate
  modified_base 14: mod_base = OTHER; note = 2'-O-methyluridine-3'-phosphate
  modified_base 15: mod_base = OTHER; note = 2'-deoxy-2'-fluorouridine-3'-phosphate
  modified_base 16: mod_base = OTHER; note = 2'-O-methylcytidine-3'-phosphate
  modified_base 17: mod_base = OTHER; note = 2'-deoxy-2'-fluoroguanosine-3'-phosphate
  modified_base 18: mod_base = OTHER; note = 2'-O-methylguanosine-3'-phosphate
  modified_base 19: mod_base = OTHER; note = 2'-deoxy-2'-fluoroadenosine-3'-phosphate
  modified_base 20: mod_base = OTHER; note = 2'-deoxythymidine-3'-phosphorothioate
  misc_feature 1..19: note = RNA
  misc_feature 20..21: note = DNA
ggcctggagtttattcggatt

SEQ ID NO: 936 - DNA, 21 bp, synthetic construct
  source 1..21: mol_type = other DNA
  modified_base 1: mod_base = OTHER; note = 2'-O-methyluridine-3'-phosphate 5'phosphate
  modified_base 2: mod_base = OTHER; note = 2'-deoxy-2'-fluorocytidine-3'-phosphate
  modified_base 3: mod_base = OTHER; note = 2'-O-methylcytidine-3'-phosphate
  modified_base 4: mod_base = OTHER; note = 2'-deoxy-2'-fluoroguanosine-3'-phosphate
  modified_base 5: mod_base = OTHER; note = 2'-O-methyladenosine-3'-phosphate
  modified_base 6: mod_base = OTHER; note = 2'-deoxy-2'-fluoroadenosine-3'-phosphate
  modified_base 7: mod_base = OTHER; note = 2'-O-methyluridine-3'-phosphate
  modified_base 8: mod_base = OTHER; note = 2'-deoxy-2'-fluoroadenosine-3'-phosphate
  modified_base 9: mod_base = OTHER; note = 2'-O-methyladenosine-3'-phosphate
  modified_base 10: mod_base = OTHER; note = 2'-deoxy-2'-fluoroadenosine-3'-phosphate
  modified_base 11: mod_base = OTHER; note = 2'-O-methylcytidine-3'-phosphate
  modified_base 12: mod_base = OTHER; note = 2'-deoxy-2'-fluorouridine-3'-phosphate
  modified_base 13: mod_base = OTHER; note = 2'-O-methylcytidine-3'-phosphate
  modified_base 14: mod_base = OTHER; note = 2'-deoxy-2'-fluorocytidine-3'-phosphate
  modified_base 15: mod_base = OTHER; note = 2'-O-methyladenosine-3'-phosphate
  modified_base 16: mod_base = OTHER; note = 2'-deoxy-2'-fluoroguanosine-3'-phosphate
  modified_base 17: mod_base = OTHER; note = 2'-O-methylguanosine-3'-phosphate
  modified_base 18: mod_base = OTHER; note = 2'-deoxy-2'-fluorocytidine-3'-phosphate
  modified_base 19: mod_base = OTHER; note = 2'-O-methylcytidine-3'-phosphate
  modified_base 20: mod_base = OTHER; note = 2'-deoxythymidine-3'-phosphorothioate
  misc_feature 1..19: note = RNA
  misc_feature 20..21: note = DNA
tccgaataaactccaggcctt

SEQ ID NO: 937 - DNA, 21 bp, synthetic construct
  source 1..21: mol_type = other DNA
  modified_base 1: mod_base = OTHER; note = guanosine-3'-phosphate
  modified_base 2: mod_base = OTHER; note = guanosine-3'-phosphate
  modified_base 3: mod_base = OTHER; note = 2'-deoxy-2'-fluorocytidine-3'-phosphate
  modified_base 4: mod_base = OTHER; note = 2'-deoxy-2'-fluorocytidine-3'-phosphate
  modified_base 5: mod_base = OTHER; note = 2'-deoxy-2'-fluorouridine-3'-phosphate
  modified_base 6: mod_base = OTHER; note = guanosine-3'-phosphate
  modified_base 7: mod_base = OTHER; note = guanosine-3'-phosphate
  modified_base 8: mod_base = OTHER; note = adenosine-3'-phosphate
  modified_base 9: mod_base = OTHER; note = guanosine-3'-phosphate
  modified_base 10: mod_base = OTHER; note = 2'-deoxy-2'-fluorouridine-3'-phosphate
  modified_base 11: mod_base = OTHER; note = 2'-deoxy-2'-fluorouridine-3'-phosphate
  modified_base 12: mod_base = OTHER; note = 2'-deoxy-2'-fluorouridine-3'-phosphate
  modified_base 13: mod_base = OTHER; note = adenosine-3'-phosphate
  modified_base 14: mod_base = OTHER; note = 2'-deoxy-2'-fluorouridine-3'-phosphate
  modified_base 15: mod_base = OTHER; note = 2'-deoxy-2'-fluorouridine-3'-phosphate
  modified_base 16: mod_base = OTHER; note = 2'-deoxy-2'-fluorocytidine-3'-phosphate
  modified_base 17: mod_base = OTHER; note = guanosine-3'-phosphate
  modified_base 18: mod_base = OTHER; note = guanosine-3'-phosphate
  modified_base 19: mod_base = OTHER; note = adenosine-3'-phosphate
  modified_base 20: mod_base = OTHER; note = 2'-deoxythymidine-3'-phosphorothioate
  misc_feature 1..19: note = RNA
  misc_feature 20..21: note = DNA
ggcctggagtttattcggatt

SEQ ID NO: 938 - DNA, 21 bp, synthetic construct
  source 1..21: mol_type = other DNA
  modified_base 1: mod_base = OTHER; note = 2'-deoxy-2'-fluorouridine-3'-phosphate
  modified_base 2: mod_base = OTHER; note = 2'-deoxy-2'-fluorocytidine-3'-phosphate
  modified_base 3: mod_base = OTHER; note = 2'-deoxy-2'-fluorocytidine-3'-phosphate
  modified_base 4: mod_base = OTHER; note = guanosine-3'-phosphate
  modified_base 5: mod_base = OTHER; note = adenosine-3'-phosphate
  modified_base 6: mod_base = OTHER; note = adenosine-3'-phosphate
  modified_base 7: mod_base = OTHER; note = 2'-deoxy-2'-fluorouridine-3'-phosphate
  modified_base 8: mod_base = OTHER; note = adenosine-3'-phosphate
  modified_base 9: mod_base = OTHER; note = adenosine-3'-phosphate
  modified_base 10: mod_base = OTHER; note = adenosine-3'-phosphate
  modified_base 11: mod_base = OTHER; note = 2'-deoxy-2'-fluorocytidine-3'-phosphate
  modified_base 12: mod_base = OTHER; note = 2'-deoxy-2'-fluorouridine-3'-phosphate
  modified_base 13: mod_base = OTHER; note = 2'-deoxy-2'-fluorocytidine-3'-phosphate
  modified_base 14: mod_base = OTHER; note = 2'-deoxy-2'-fluorocytidine-3'-phosphate
  modified_base 15: mod_base = OTHER; note = adenosine-3'-phosphate
  modified_base 16: mod_base = OTHER; note = guanosine-3'-phosphate
  modified_base 17: mod_base = OTHER; note = guanosine-3'-phosphate
  modified_base 18: mod_base = OTHER; note = 2'-deoxy-2'-fluorocytidine-3'-phosphate
  modified_base 19: mod_base = OTHER; note = 2'-deoxy-2'-fluorocytidine-3'-phosphate
  modified_base 20: mod_base = OTHER; note = 2'-deoxythymidine-3'-phosphorothioate
  misc_feature 1..19: note = RNA
  misc_feature 20..21: note = DNA
tccgaataaactccaggcctt

SEQ ID NO: 939 - DNA, 21 bp, synthetic construct
  source 1..21: mol_type = other DNA
  modified_base 1: mod_base = OTHER; note = guanosine-3'-phosphate
  modified_base 2: mod_base = OTHER; note = 2'-O-methylguanosine-3'-phosphate
  modified_base 3: mod_base = OTHER; note = cytidine-3'-phosphate
  modified_base 4: mod_base = OTHER; note = 2'-O-methylcytidine-3'-phosphate
  modified_base 5: mod_base = OTHER; note = uridine-3'-phosphate
  modified_base 6: mod_base = OTHER; note = 2'-O-methylguanosine-3'-phosphate
  modified_base 7: mod_base = OTHER; note = guanosine-3'-phosphate
  modified_base 8: mod_base = OTHER; note = 2'-O-methyladenosine-3'-phosphate
  modified_base 9: mod_base = OTHER; note = guanosine-3'-phosphate
  modified_base 10: mod_base = OTHER; note = 2'-O-methyluridine-3'-phosphate
  modified_base 11: mod_base = OTHER; note = uridine-3'-phosphate
  modified_base 12: mod_base = OTHER; note = 2'-O-methyluridine-3'-phosphate
  modified_base 13: mod_base = OTHER; note = adenosine-3'-phosphate
  modified_base 14: mod_base = OTHER; note = 2'-O-methyluridine-3'-phosphate
  modified_base 15: mod_base = OTHER; note = uridine-3'-phosphate
  modified_base 16: mod_base = OTHER; note = 2'-O-methylcytidine-3'-phosphate
  modified_base 17: mod_base = OTHER; note = guanosine-3'-phosphate
  modified_base 18: mod_base = OTHER; note = 2'-O-methylguanosine-3'-phosphate
  modified_base 19: mod_base = OTHER; note = adenosine-3'-phosphate
  modified_base 20: mod_base = OTHER; note = 2'-deoxythymidine-3'-phosphorothioate
  misc_feature 1..19: note = RNA
  misc_feature 20..21: note = DNA
ggcctggagtttattcggatt

SEQ ID NO: 940 - DNA, 21 bp, synthetic construct
  source 1..21: mol_type = other DNA
  modified_base 1: mod_base = OTHER; note = 2'-O-methyluridine-3'-phosphate 5'phosphate
  modified_base 2: mod_base = OTHER; note = 2'-deoxy-2'-fluorocytidine-3'-phosphate
  modified_base 3: mod_base = OTHER; note = 2'-O-methylcytidine-3'-phosphate
  modified_base 4: mod_base = OTHER; note = 2'-deoxy-2'-fluoroguanosine-3'-phosphate
  modified_base 5: mod_base = OTHER; note = 2'-O-methyladenosine-3'-phosphate
  modified_base 6: mod_base = OTHER; note = 2'-deoxy-2'-fluoroadenosine-3'-phosphate
  modified_base 7: mod_base = OTHER; note = 2'-O-methyluridine-3'-phosphate
  modified_base 8: mod_base = OTHER; note = 2'-deoxy-2'-fluoroadenosine-3'-phosphate
  modified_base 9: mod_base = OTHER; note = 2'-O-methyladenosine-3'-phosphate
  modified_base 10: mod_base = OTHER; note = 2'-deoxy-2'-fluoroadenosine-3'-phosphate
  modified_base 11: mod_base = OTHER; note = 2'-O-methylcytidine-3'-phosphate
  modified_base 12: mod_base = OTHER; note = 2'-deoxy-2'-fluorouridine-3'-phosphate
  modified_base 13: mod_base = OTHER; note = 2'-O-methylcytidine-3'-phosphate
  modified_base 14: mod_base = OTHER; note = 2'-deoxy-2'-fluorocytidine-3'-phosphate
  modified_base 15: mod_base = OTHER; note = 2'-O-methyladenosine-3'-phosphate
  modified_base 16: mod_base = OTHER; note = 2'-deoxy-2'-fluoroguanosine-3'-phosphate
  modified_base 17: mod_base = OTHER; note = 2'-O-methylguanosine-3'-phosphate
  modified_base 18: mod_base = OTHER; note = 2'-deoxy-2'-fluorocytidine-3'-phosphate
  modified_base 19: mod_base = OTHER; note = 2'-O-methylcytidine-3'-phosphate
  modified_base 20: mod_base = OTHER; note = 2'-deoxythymidine-3'-phosphorothioate
  misc_feature 1..19: note = RNA
  misc_feature 20..21: note = DNA
tccgaataaactccaggcctt

SEQ ID NO: 941 - DNA, 21 bp, synthetic construct
  source 1..21: mol_type = other DNA
  modified_base 1: mod_base = OTHER; note = guanosine-3'-phosphate
  modified_base 2: mod_base = OTHER; note = 2'-O-methylguanosine-3'-phosphate
  modified_base 3: mod_base = OTHER; note = cytidine-3'-phosphate
  modified_base 4: mod_base = OTHER; note = 2'-O-methylcytidine-3'-phosphate
  modified_base 5: mod_base = OTHER; note = uridine-3'-phosphate
  modified_base 6: mod_base = OTHER; note = 2'-O-methylguanosine-3'-phosphate
  modified_base 7: mod_base = OTHER; note = guanosine-3'-phosphate
  modified_base 8: mod_base = OTHER; note = 2'-O-methyladenosine-3'-phosphate
  modified_base 9: mod_base = OTHER; note = guanosine-3'-phosphate
  modified_base 10: mod_base = OTHER; note = 2'-O-methyluridine-3'-phosphate
  modified_base 11: mod_base = OTHER; note = uridine-3'-phosphate
  modified_base 12: mod_base = OTHER; note = 2'-O-methyluridine-3'-phosphate
  modified_base 13: mod_base = OTHER; note = adenosine-3'-phosphate
  modified_base 14: mod_base = OTHER; note = 2'-O-methyluridine-3'-phosphate
  modified_base 15: mod_base = OTHER; note = uridine-3'-phosphate
  modified_base 16: mod_base = OTHER; note = 2'-O-methylcytidine-3'-phosphate
  modified_base 17: mod_base = OTHER; note = guanosine-3'-phosphate
  modified_base 18: mod_base = OTHER; note = 2'-O-methylguanosine-3'-phosphate
  modified_base 19: mod_base = OTHER; note = adenosine-3'-phosphate
  modified_base 20: mod_base = OTHER; note = 2'-deoxythymidine-3'-phosphorothioate
  misc_feature 1..19: note = RNA
  misc_feature 20..21: note = DNA
ggcctggagtttattcggatt

SEQ ID NO: 942 - DNA, 21 bp, synthetic construct
  source 1..21: mol_type = other DNA
  modified_base 1: mod_base = OTHER; note = 2'-deoxy-2'-fluorouridine-3'-phosphate
  modified_base 2: mod_base = OTHER; note = 2'-deoxy-2'-fluorocytidine-3'-phosphate
  modified_base 3: mod_base = OTHER; note = 2'-deoxy-2'-fluorocytidine-3'-phosphate
  modified_base 4: mod_base = OTHER; note = guanosine-3'-phosphate
  modified_base 5: mod_base = OTHER; note = adenosine-3'-phosphate
  modified_base 6: mod_base = OTHER; note = adenosine-3'-phosphate
  modified_base 7: mod_base = OTHER; note = 2'-deoxy-2'-fluorouridine-3'-phosphate
  modified_base 8: mod_base = OTHER; note = adenosine-3'-phosphate
  modified_base 9: mod_base = OTHER; note = adenosine-3'-phosphate
  modified_base 10: mod_base = OTHER; note = adenosine-3'-phosphate
  modified_base 11: mod_base = OTHER; note = 2'-deoxy-2'-fluorocytidine-3'-phosphate
  modified_base 12: mod_base = OTHER; note = 2'-deoxy-2'-fluorouridine-3'-phosphate
  modified_base 13: mod_base = OTHER; note = 2'-deoxy-2'-fluorocytidine-3'-phosphate
  modified_base 14: mod_base = OTHER; note = 2'-deoxy-2'-fluorocytidine-3'-phosphate
  modified_base 15: mod_base = OTHER; note = adenosine-3'-phosphate
  modified_base 16: mod_base = OTHER; note = guanosine-3'-phosphate
  modified_base 17: mod_base = OTHER; note = guanosine-3'-phosphate
  modified_base 18: mod_base = OTHER; note = 2'-deoxy-2'-fluorocytidine-3'-phosphate
  modified_base 19: mod_base = OTHER; note = 2'-deoxy-2'-fluorocytidine-3'-phosphate
  modified_base 20: mod_base = OTHER; note = 2'-deoxythymidine-3'-phosphorothioate
  misc_feature 1..19: note = RNA
  misc_feature 20..21: note = DNA
tccgaataaactccaggcctt

SEQ ID NO: 943 - DNA, 21 bp, synthetic construct
  source 1..21: mol_type = other DNA
  modified_base 1: mod_base = OTHER; note = 2'-deoxy-2'-fluoroguanosine-3'-phosphate
  modified_base 2: mod_base = OTHER; note = 2'-O-methylguanosine-3'-phosphate
  modified_base 3: mod_base = OTHER; note = 2'-deoxy-2'-fluorocytidine-3'-phosphate
  modified_base 4: mod_base = OTHER; note = 2'-O-methylcytidine-3'-phosphate
  modified_base 5: mod_base = OTHER; note = 2'-deoxy-2'-fluorouridine-3'-phosphate
  modified_base 6: mod_base = OTHER; note = 2'-O-methylguanosine-3'-phosphate
  modified_base 7: mod_base = OTHER; note = 2'-deoxy-2'-fluoroguanosine-3'-phosphate
  modified_base 8: mod_base = OTHER; note = 2'-O-methyladenosine-3'-phosphate
  modified_base 9: mod_base = OTHER; note = 2'-deoxy-2'-fluoroguanosine-3'-phosphate
  modified_base 10: mod_base = OTHER; note = 2'-O-methyluridine-3'-phosphate
  modified_base 11: mod_base = OTHER; note = 2'-deoxy-2'-fluorouridine-3'-phosphate
  modified_base 12: mod_base = OTHER; note = 2'-O-methyluridine-3'-phosphate
  modified_base 13: mod_base = OTHER; note = 2'-deoxy-2'-fluoroadenosine-3'-phosphate
  modified_base 14: mod_base = OTHER; note = 2'-O-methyluridine-3'-phosphate
  modified_base 15: mod_base = OTHER; note = 2'-deoxy-2'-fluorouridine-3'-phosphate
  modified_base 16: mod_base = OTHER; note = 2'-O-methylcytidine-3'-phosphate
  modified_base 17: mod_base = OTHER; note = 2'-deoxy-2'-fluoroguanosine-3'-phosphate
  modified_base 18: mod_base = OTHER; note = 2'-O-methylguanosine-3'-phosphate
  modified_base 19: mod_base = OTHER; note = 2'-deoxy-2'-fluoroadenosine-3'-phosphate
  modified_base 20: mod_base = OTHER; note = 2'-deoxythymidine-3'-phosphorothioate
  misc_feature 1..19: note = RNA
  misc_feature 20..21: note = DNA
ggcctggagtttattcggatt

SEQ ID NO: 944 - DNA, 21 bp, synthetic construct
  source 1..21: mol_type = other DNA
  modified_base 1: mod_base = OTHER; note = uridine-3'-phosphate
  modified_base 2: mod_base = OTHER; note = cytidine-3'-phosphate
  modified_base 3: mod_base = OTHER; note = cytidine-3'-phosphate
  modified_base 4: mod_base = OTHER; note = guanosine-3'-phosphate
  modified_base 5: mod_base = OTHER; note = adenosine-3'-phosphate
  modified_base 6: mod_base = OTHER; note = 2'-O-methyladenosine-3'-phosphate
  modified_base 7: mod_base = OTHER; note = 2'-O-methyluridine-3'-phosphate
  modified_base 8: mod_base = OTHER; note = adenosine-3'-phosphate
  modified_base 9: mod_base = OTHER; note = adenosine-3'-phosphate
  modified_base 10: mod_base = OTHER; note = 2'-O-methyladenosine-3'-phosphate
  modified_base 11: mod_base = OTHER; note = 2'-O-methylcytidine-3'-phosphate
  modified_base 12: mod_base = OTHER; note = uridine-3'-phosphate
  modified_base 13: mod_base = OTHER; note = cytidine-3'-phosphate
  modified_base 14: mod_base = OTHER; note = cytidine-3'-phosphate
  modified_base 15: mod_base = OTHER; note = adenosine-3'-phosphate
  modified_base 16: mod_base = OTHER; note = guanosine-3'-phosphate
  modified_base 17: mod_base = OTHER; note = 2'-O-methylguanosine-3'-phosphate
  modified_base 18: mod_base = OTHER; note = 2'-O-methylcytidine-3'-phosphate
  modified_base 19: mod_base = OTHER; note = 2'-O-methylcytidine-3'-phosphate
  modified_base 20: mod_base = OTHER; note = 2'-deoxythymidine-3'-phosphorothioate
  misc_feature 1..19: note = RNA
  misc_feature 20..21: note = DNA
tccgaataaactccaggcctt

SEQ ID NO: 945 - DNA, 21 bp, synthetic construct
  source 1..21: mol_type = other DNA
  modified_base 1: mod_base = OTHER; note = guanosine-3'-phosphate
  modified_base 2: mod_base = OTHER; note = guanosine-3'-phosphate
  modified_base 3: mod_base = OTHER; note = 2'-deoxy-2'-fluorocytidine-3'-phosphate
  modified_base 4: mod_base = OTHER; note = 2'-deoxy-2'-fluorocytidine-3'-phosphate
  modified_base 5: mod_base = OTHER; note = 2'-deoxy-2'-fluorouridine-3'-phosphate
  modified_base 6: mod_base = OTHER; note = guanosine-3'-phosphate
  modified_base 7: mod_base = OTHER; note = guanosine-3'-phosphate
  modified_base 8: mod_base = OTHER; note = adenosine-3'-phosphate
  modified_base 9: mod_base = OTHER; note = guanosine-3'-phosphate
  modified_base 10: mod_base = OTHER; note = 2'-deoxy-2'-fluorouridine-3'-phosphate
  modified_base 11: mod_base = OTHER; note = 2'-deoxy-2'-fluorouridine-3'-phosphate
  modified_base 12: mod_base = OTHER; note = 2'-deoxy-2'-fluorouridine-3'-phosphate
  modified_base 13: mod_base = OTHER; note = adenosine-3'-phosphate
  modified_base 14: mod_base = OTHER; note = 2'-deoxy-2'-fluorouridine-3'-phosphate
  modified_base 15: mod_base = OTHER; note = 2'-deoxy-2'-fluorouridine-3'-phosphate
  modified_base 16: mod_base = OTHER; note = 2'-deoxy-2'-fluorocytidine-3'-phosphate
  modified_base 17: mod_base = OTHER; note = guanosine-3'-phosphate
  modified_base 18: mod_base = OTHER; note = guanosine-3'-phosphate
  modified_base 19: mod_base = OTHER; note = adenosine-3'-phosphate
  modified_base 20: mod_base = OTHER; note = 2'-deoxythymidine-3'-phosphorothioate
  misc_feature 1..19: note = RNA
  misc_feature 20..21: note = DNA
ggcctggagtttattcggatt

SEQ ID NO: 946 - DNA, 21 bp, synthetic construct
  source 1..21: mol_type = other DNA
  modified_base 1: mod_base = OTHER; note = uridine-3'-phosphate
  modified_base 2: mod_base = OTHER; note = cytidine-3'-phosphate
  modified_base 3: mod_base = OTHER; note = cytidine-3'-phosphate
  modified_base 4: mod_base = OTHER; note = guanosine-3'-phosphate
  modified_base 5: mod_base = OTHER; note = adenosine-3'-phosphate
  modified_base 6: mod_base = OTHER; note = 2'-O-methyladenosine-3'-phosphate
  modified_base 7: mod_base = OTHER; note = 2'-O-methyluridine-3'-phosphate
  modified_base 8: mod_base = OTHER; note = adenosine-3'-phosphate
  modified_base 9: mod_base = OTHER; note = adenosine-3'-phosphate
  modified_base 10: mod_base = OTHER; note = 2'-O-methyladenosine-3'-phosphate
  modified_base 11: mod_base = OTHER; note = 2'-O-methylcytidine-3'-phosphate
  modified_base 12: mod_base = OTHER; note = uridine-3'-phosphate
  modified_base 13: mod_base = OTHER; note = cytidine-3'-phosphate
  modified_base 14: mod_base = OTHER; note = cytidine-3'-phosphate
  modified_base 15: mod_base = OTHER; note = adenosine-3'-phosphate
  modified_base 16: mod_base = OTHER; note = guanosine-3'-phosphate
  modified_base 17: mod_base = OTHER; note = 2'-O-methylguanosine-3'-phosphate
  modified_base 18: mod_base = OTHER; note = 2'-O-methylcytidine-3'-phosphate
  modified_base 19: mod_base = OTHER; note = 2'-O-methylcytidine-3'-phosphate
  modified_base 20: mod_base = OTHER; note = 2'-deoxythymidine-3'-phosphorothioate
  misc_feature 1..19: note = RNA
  misc_feature 20..21: note = DNA
tccgaataaactccaggcctt

SEQ ID NO: 947 - DNA, 21 bp, synthetic construct
  source 1..21: mol_type = other DNA
  modified_base 1: mod_base = OTHER; note = guanosine-3'-phosphate
  modified_base 2: mod_base = OTHER; note = 2'-O-methylguanosine-3'-phosphate
  modified_base 3: mod_base = OTHER; note = cytidine-3'-phosphate
  modified_base 4: mod_base = OTHER; note = 2'-O-methylcytidine-3'-phosphate
  modified_base 5: mod_base = OTHER; note = uridine-3'-phosphate
  modified_base 6: mod_base = OTHER; note = 2'-O-methylguanosine-3'-phosphate
  modified_base 7: mod_base = OTHER; note = guanosine-3'-phosphate
  modified_base 8: mod_base = OTHER; note = 2'-O-methyladenosine-3'-phosphate
  modified_base 9: mod_base = OTHER; note = guanosine-3'-phosphate
  modified_base 10: mod_base = OTHER; note = 2'-O-methyluridine-3'-phosphate
  modified_base 11: mod_base = OTHER; note = uridine-3'-phosphate
  modified_base 12: mod_base = OTHER; note = 2'-O-methyluridine-3'-phosphate
  modified_base 13: mod_base = OTHER; note = adenosine-3'-phosphate
  modified_base 14: mod_base = OTHER; note = 2'-O-methyluridine-3'-phosphate
  modified_base 15: mod_base = OTHER; note = uridine-3'-phosphate
  modified_base 16: mod_base = OTHER; note = 2'-O-methylcytidine-3'-phosphate
  modified_base 17: mod_base = OTHER; note = guanosine-3'-phosphate
  modified_base 18: mod_base = OTHER; note = 2'-O-methylguanosine-3'-phosphate
  modified_base 19: mod_base = OTHER; note = adenosine-3'-phosphate
  modified_base 20: mod_base = OTHER; note = 2'-deoxythymidine-3'-phosphorothioate
  misc_feature 1..19: note = RNA
  misc_feature 20..21: note = DNA
ggcctggagtttattcggatt

SEQ ID NO: 948 - DNA, 21 bp, synthetic construct
  source 1..21: mol_type = other DNA
  modified_base 1: mod_base = OTHER; note = uridine-3'-phosphate
  modified_base 2: mod_base = OTHER; note = cytidine-3'-phosphate
  modified_base 3: mod_base = OTHER; note = cytidine-3'-phosphate
  modified_base 4: mod_base = OTHER; note = guanosine-3'-phosphate
  modified_base 5: mod_base = OTHER; note = adenosine-3'-phosphate
  modified_base 6: mod_base = OTHER; note = 2'-O-methyladenosine-3'-phosphate
  modified_base 7: mod_base = OTHER; note = 2'-O-methyluridine-3'-phosphate
  modified_base 8: mod_base = OTHER; note = adenosine-3'-phosphate
  modified_base 9: mod_base = OTHER; note = adenosine-3'-phosphate
  modified_base 10: mod_base = OTHER; note = 2'-O-methyladenosine-3'-phosphate
  modified_base 11: mod_base = OTHER; note = 2'-O-methylcytidine-3'-phosphate
  modified_base 12: mod_base = OTHER; note = uridine-3'-phosphate
  modified_base 13: mod_base = OTHER; note = cytidine-3'-phosphate
  modified_base 14: mod_base = OTHER; note = cytidine-3'-phosphate
  modified_base 15: mod_base = OTHER; note = adenosine-3'-phosphate
  modified_base 16: mod_base = OTHER; note = guanosine-3'-phosphate
  modified_base 17: mod_base = OTHER; note = 2'-O-methylguanosine-3'-phosphate
  modified_base 18: mod_base = OTHER; note = 2'-O-methylcytidine-3'-phosphate
  modified_base 19: mod_base = OTHER; note = 2'-O-methylcytidine-3'-phosphate
  modified_base 20: mod_base = OTHER; note = 2'-deoxythymidine-3'-phosphorothioate
  misc_feature 1..19: note = RNA
  misc_feature 20..21: note = DNA
tccgaataaactccaggcctt

SEQ ID NO: 949 - DNA, 21 bp, synthetic construct
  source 1..21: mol_type = other DNA
  modified_base 1: mod_base = OTHER; note = guanosine-3'-phosphate
  modified_base 2: mod_base = OTHER; note = cytidine-3'-phosphate
  modified_base 3: mod_base = OTHER; note = adenosine-3'-phosphate
  modified_base 4: mod_base = OTHER; note = guanosine-3'-phosphate
  modified_base 5: mod_base = OTHER; note = guanosine-3'-phosphate
  modified_base 6: mod_base = OTHER; note = adenosine-3'-phosphate
  modified_base 7: mod_base = OTHER; note = uridine-3'-phosphate
  modified_base 8: mod_base = OTHER; note = uridine-3'-phosphate
  modified_base 9: mod_base = OTHER; note = cytidine-3'-phosphate
  modified_base 10: mod_base = OTHER; note = uridine-3'-phosphate
  modified_base 11: mod_base = OTHER; note = uridine-3'-phosphate
  modified_base 12: mod_base = OTHER; note = cytidine-3'-phosphate
  modified_base 13: mod_base = OTHER; note = cytidine-3'-phosphate
  modified_base 14: mod_base = OTHER; note = cytidine-3'-phosphate
  modified_base 15: mod_base = OTHER; note = adenosine-3'-phosphate
  modified_base 16: mod_base = OTHER; note = uridine-3'-phosphate
  modified_base 17: mod_base = OTHER; note = guanosine-3'-phosphate
  modified_base 18: mod_base = OTHER; note = guanosine-3'-phosphate
  modified_base 19: mod_base = OTHER; note = adenosine-3'-phosphate
  misc_feature 1..19: note = RNA
  misc_feature 20..21: note = DNA
gcaggattcttcccatggatt

SEQ ID NO: 950 - DNA, 21 bp, synthetic construct
  source 1..21: mol_type = other DNA
  modified_base 1: mod_base = OTHER; note = uridine-3'-phosphate
  modified_base 2: mod_base = OTHER; note = cytidine-3'-phosphate
  modified_base 3: mod_base = OTHER; note = cytidine-3'-phosphate
  modified_base 4: mod_base = OTHER; note = adenosine-3'-phosphate
  modified_base 5: mod_base = OTHER; note = uridine-3'-phosphate
  modified_base 6: mod_base = OTHER; note = guanosine-3'-phosphate
  modified_base 7: mod_base = OTHER; note = guanosine-3'-phosphate
  modified_base 8: mod_base = OTHER; note = guanosine-3'-phosphate
  modified_base 9: mod_base = OTHER; note = adenosine-3'-phosphate
  modified_base 10: mod_base = OTHER; note = adenosine-3'-phosphate
  modified_base 11: mod_base = OTHER; note = guanosine-3'-phosphate
  modified_base 12: mod_base = OTHER; note = adenosine-3'-phosphate
  modified_base 13: mod_base = OTHER; note = adenosine-3'-phosphate
  modified_base 14: mod_base = OTHER; note = uridine-3'-phosphate
  modified_base 15: mod_base = OTHER; note = cytidine-3'-phosphate
  modified_base 16: mod_base = OTHER; note = cytidine-3'-phosphate
  modified_base 17: mod_base = OTHER; note = uridine-3'-phosphate
  modified_base 18: mod_base = OTHER; note = guanosine-3'-phosphate
  modified_base 19: mod_base = OTHER; note = cytidine-3'-phosphate
  misc_feature 1..19: note = RNA
  misc_feature 20..21: note = DNA
tccatgggaagaatcctgctt

SEQ ID NO: 951 - DNA, 21 bp, synthetic construct
  source 1..21: mol_type = other DNA
  modified_base 1: mod_base = OTHER; note = uridine-3'-phosphate
  modified_base 2: mod_base = OTHER; note = guanosine-3'-phosphate
  modified_base 3: mod_base = OTHER; note = cytidine-3'-phosphate
  modified_base 4: mod_base = OTHER; note = adenosine-3'-phosphate
  modified_base 5: mod_base = OTHER; note = guanosine-3'-phosphate
  modified_base 6: mod_base = OTHER; note = guanosine-3'-phosphate
  modified_base 7: mod_base = OTHER; note = guanosine-3'-phosphate
  modified_base 8: mod_base = OTHER; note = adenosine-3'-phosphate
  modified_base 9: mod_base = OTHER; note = cytidine-3'-phosphate
  modified_base 10: mod_base = OTHER; note = adenosine-3'-phosphate
  modified_base 11: mod_base = OTHER; note = adenosine-3'-phosphate
  modified_base 12: mod_base = OTHER; note = adenosine-3'-phosphate
  modified_base 13: mod_base = OTHER; note = cytidine-3'-phosphate
  modified_base 14: mod_base = OTHER; note = adenosine-3'-phosphate
  modified_base 15: mod_base = OTHER; note = uridine-3'-phosphate
  modified_base 16: mod_base = OTHER; note = cytidine-3'-phosphate
  modified_base 17: mod_base = OTHER; note = guanosine-3'-phosphate
  modified_base 18: mod_base = OTHER; note = uridine-3'-phosphate
  modified_base 19: mod_base = OTHER; note = uridine-3'-phosphate
  misc_feature 1..19: note = RNA
  misc_feature 20..21: note = DNA
tgcagggacaaacatcgtttt

SEQ ID NO: 952 - DNA, 21 bp, synthetic construct
  source 1..21: mol_type = other DNA
  modified_base 1: mod_base = OTHER; note = adenosine-3'-phosphate
  modified_base 2: mod_base = OTHER; note = adenosine-3'-phosphate
  modified_base 3: mod_base = OTHER; note = cytidine-3'-phosphate
  modified_base 4: mod_base = OTHER; note = guanosine-3'-phosphate
  modified_base 5: mod_base = OTHER; note = adenosine-3'-phosphate
  modified_base 6: mod_base = OTHER; note = uridine-3'-phosphate
  modified_base 7: mod_base = OTHER; note = guanosine-3'-phosphate
  modified_base 8: mod_base = OTHER; note = uridine-3'-phosphate
  modified_base 9: mod_base = OTHER; note = uridine-3'-phosphate
  modified_base 10: mod_base = OTHER; note = uridine-3'-phosphate
  modified_base 11: mod_base = OTHER; note = guanosine-3'-phosphate
  modified_base 12: mod_base = OTHER; note = uridine-3'-phosphate
  modified_base 13: mod_base = OTHER; note = cytidine-3'-phosphate
  modified_base 14: mod_base = OTHER; note = cytidine-3'-phosphate
  modified_base 15: mod_base = OTHER; note = cytidine-3'-phosphate
  modified_base 16: mod_base = OTHER; note = uridine-3'-phosphate
  modified_base 17: mod_base = OTHER; note = guanosine-3'-phosphate
  modified_base 18: mod_base = OTHER; note = cytidine-3'-phosphate
  modified_base 19: mod_base = OTHER; note = adenosine-3'-phosphate
  misc_feature 1..19: note = RNA
  misc_feature 20..21: note = DNA
aacgatgtttgtccctgcatt

SEQ ID NO: 953 - DNA, 21 bp, synthetic construct
  source 1..21: mol_type = other DNA
  modified_base 1: mod_base = OTHER; note = guanosine-3'-phosphate
  modified_base 2: mod_base = OTHER; note = cytidine-3'-phosphate
  modified_base 3: mod_base = OTHER; note = adenosine-3'-phosphate
  modified_base 4: mod_base = OTHER; note = guanosine-3'-phosphate
  modified_base 5: mod_base = OTHER; note = guanosine-3'-phosphate
  modified_base 6: mod_base = OTHER; note = guanosine-3'-phosphate
  modified_base 7: mod_base = OTHER; note = adenosine-3'-phosphate
  modified_base 8: mod_base = OTHER; note = cytidine-3'-phosphate
  modified_base 9: mod_base = OTHER; note = adenosine-3'-phosphate
  modified_base 10: mod_base = OTHER; note = adenosine-3'-phosphate
  modified_base 11: mod_base = OTHER; note = adenosine-3'-phosphate
  modified_base 12: mod_base = OTHER; note = cytidine-3'-phosphate
  modified_base 13: mod_base = OTHER; note = adenosine-3'-phosphate
  modified_base 14: mod_base = OTHER; note = uridine-3'-phosphate
  modified_base 15: mod_base = OTHER; note = cytidine-3'-phosphate
  modified_base 16: mod_base = OTHER; note = guanosine-3'-phosphate
  modified_base 17: mod_base = OTHER; note = uridine-3'-phosphate
  modified_base 18: mod_base = OTHER; note = uridine-3'-phosphate
  modified_base 19: mod_base = OTHER; note = guanosine-3'-phosphate
  misc_feature 1..19: note = RNA
  misc_feature 20..21: note = DNA
gcagggacaaacatcgttgtt

SEQ ID NO: 954 - DNA, 21 bp, synthetic construct
  source 1..21: mol_type = other DNA
  modified_base 1: mod_base = OTHER; note = cytidine-3'-phosphate
  modified_base 2: mod_base = OTHER; note = adenosine-3'-phosphate
  modified_base 3: mod_base = OTHER; note = adenosine-3'-phosphate
  modified_base 4: mod_base = OTHER; note = cytidine-3'-phosphate
  modified_base 5: mod_base = OTHER; note = guanosine-3'-phosphate
  modified_base 6: mod_base = OTHER; note = adenosine-3'-phosphate
  modified_base 7: mod_base = OTHER; note = uridine-3'-phosphate
  modified_base 8: mod_base = OTHER; note = guanosine-3'-phosphate
  modified_base 9: mod_base = OTHER; note = uridine-3'-phosphate
  modified_base 10: mod_base = OTHER; note = uridine-3'-phosphate
  modified_base 11: mod_base = OTHER; note = uridine-3'-phosphate
  modified_base 12: mod_base = OTHER; note = guanosine-3'-phosphate
  modified_base 13: mod_base = OTHER; note = uridine-3'-phosphate
  modified_base 14: mod_base = OTHER; note = cytidine-3'-phosphate
  modified_base 15: mod_base = OTHER; note = cytidine-3'-phosphate
  modified_base 16: mod_base = OTHER; note = cytidine-3'-phosphate
  modified_base 17: mod_base = OTHER; note = uridine-3'-phosphate
  modified_base 18: mod_base = OTHER; note = guanosine-3'-phosphate
  modified_base 19: mod_base = OTHER; note = cytidine-3'-phosphate
  misc_feature 1..19: note = RNA
  misc_feature 20..21: note = DNA
caacgatgtttgtccctgctt

SEQ ID NO: 955 - DNA, 21 bp, synthetic construct
  source 1..21: mol_type = other DNA
  modified_base 1: mod_base = OTHER; note = adenosine-3'-phosphate
  modified_base 2: mod_base = OTHER; note = guanosine-3'-phosphate
  modified_base 3: mod_base = OTHER; note = guanosine-3'-phosphate
  modified_base 4: mod_base = OTHER; note = guanosine-3'-phosphate
  modified_base 5: mod_base = OTHER; note = adenosine-3'-phosphate
  modified_base 6: mod_base = OTHER; note = cytidine-3'-phosphate
  modified_base 7: mod_base = OTHER; note = adenosine-3'-phosphate
  modified_base 8: mod_base = OTHER; note = adenosine-3'-phosphate
  modified_base 9: mod_base = OTHER; note = adenosine-3'-phosphate
  modified_base 10: mod_base = OTHER; note = cytidine-3'-phosphate
  modified_base 11: mod_base = OTHER; note = adenosine-3'-phosphate
  modified_base 12: mod_base = OTHER; note = uridine-3'-phosphate
  modified_base 13: mod_base = OTHER; note = cytidine-3'-phosphate
  modified_base 14: mod_base = OTHER; note = guanosine-3'-phosphate
  modified_base 15: mod_base = OTHER; note = uridine-3'-phosphate
  modified_base 16: mod_base = OTHER; note = uridine-3'-phosphate
  modified_base 17: mod_base = OTHER; note = guanosine-3'-phosphate
  modified_base 18: mod_base = OTHER; note = guanosine-3'-phosphate
  modified_base 19: mod_base = OTHER; note = guanosine-3'-phosphate
  misc_feature 1..19: note = RNA
  misc_feature 20..21: note = DNA
agggacaaacatcgttgggtt

SEQ ID NO: 956 - DNA, 21 bp, synthetic construct
  source 1..21: mol_type = other DNA
  modified_base 1: mod_base = OTHER; note = cytidine-3'-phosphate
  modified_base 2: mod_base = OTHER; note = cytidine-3'-phosphate
  modified_base 3: mod_base = OTHER; note = cytidine-3'-phosphate
  modified_base 4: mod_base = OTHER; note = adenosine-3'-phosphate
  modified_base 5: mod_base = OTHER; note = adenosine-3'-phosphate
  modified_base 6: mod_base = OTHER; note = cytidine-3'-phosphate
  modified_base 7: mod_base = OTHER; note = guanosine-3'-phosphate
  modified_base 8: mod_base = OTHER; note = adenosine-3'-phosphate
  modified_base 9: mod_base = OTHER; note = uridine-3'-phosphate
  modified_base 10: mod_base = OTHER; note = guanosine-3'-phosphate
  modified_base 11: mod_base = OTHER; note = uridine-3'-phosphate
  modified_base 12: mod_base = OTHER; note = uridine-3'-phosphate
  modified_base 13: mod_base = OTHER; note = uridine-3'-phosphate
  modified_base 14: mod_base = OTHER; note = guanosine-3'-phosphate
  modified_base 15: mod_base = OTHER; note = uridine-3'-phosphate
  modified_base 16: mod_base = OTHER; note = cytidine-3'-phosphate
  modified_base 17: mod_base = OTHER; note = cytidine-3'-phosphate
  modified_base 18: mod_base = OTHER; note = cytidine-3'-phosphate
  modified_base 19: mod_base = OTHER; note = uridine-3'-phosphate
  misc_feature 1..19: note = RNA
  misc_feature 20..21: note = DNA
cccaacgatgtttgtcccttt

SEQ ID NO: 957 - DNA, 21 bp, synthetic construct
  source 1..21: mol_type = other DNA
  modified_base 1: mod_base = OTHER; note = cytidine-3'-phosphate
  modified_base 2: mod_base = OTHER; note = cytidine-3'-phosphate
  modified_base 3: mod_base = OTHER; note = cytidine-3'-phosphate
  modified_base 4: mod_base = OTHER; note = uridine-3'-phosphate
  modified_base 5: mod_base = OTHER; note = cytidine-3'-phosphate
  modified_base 6: mod_base = OTHER; note = adenosine-3'-phosphate
  modified_base 7: mod_base = OTHER; note = uridine-3'-phosphate
  modified_base 8: mod_base = OTHER; note = cytidine-3'-phosphate
  modified_base 9: mod_base = OTHER; note = uridine-3'-phosphate
  modified_base 10: mod_base = OTHER; note = cytidine-3'-phosphate
  modified_base 11: mod_base = OTHER; note = cytidine-3'-phosphate
  modified_base 12: mod_base = OTHER; note = adenosine-3'-phosphate
  modified_base 13: mod_base = OTHER; note = guanosine-3'-phosphate
  modified_base 14: mod_base = OTHER; note = cytidine-3'-phosphate
  modified_base 15: mod_base = OTHER; note = uridine-3'-phosphate
  modified_base 16: mod_base = OTHER; note = adenosine-3'-phosphate
  modified_base 17: mod_base = OTHER; note = adenosine-3'-phosphate
  modified_base 18: mod_base = OTHER; note = cytidine-3'-phosphate
  modified_base 19: mod_base = OTHER; note = uridine-3'-phosphate
  misc_feature 1..19: note = RNA
  misc_feature 20..21: note = DNA
ccctcatctccagctaacttt

SEQ ID NO: 958 - DNA, 21 bp, synthetic construct
  source 1..21: mol_type = other DNA
  modified_base 1: mod_base = OTHER; note = adenosine-3'-phosphate
  modified_base 2: mod_base = OTHER; note = guanosine-3'-phosphate
  modified_base 3: mod_base = OTHER; note = uridine-3'-phosphate
  modified_base 4: mod_base = OTHER; note = uridine-3'-phosphate
  modified_base 5: mod_base = OTHER; note = adenosine-3'-phosphate
  modified_base 6: mod_base = OTHER; note = guanosine-3'-phosphate
  modified_base 7: mod_base = OTHER; note = cytidine-3'-phosphate
  modified_base 8: mod_base = OTHER; note = uridine-3'-phosphate
  modified_base 9: mod_base = OTHER; note = guanosine-3'-phosphate
  modified_base 10: mod_base = OTHER; note = guanosine-3'-phosphate
  modified_base 11: mod_base = OTHER; note = adenosine-3'-phosphate
  modified_base 12: mod_base = OTHER; note = guanosine-3'-phosphate
  modified_base 13: mod_base = OTHER; note = adenosine-3'-phosphate
  modified_base 14: mod_base = OTHER; note = uridine-3'-phosphate
  modified_base 15: mod_base = OTHER; note = guanosine-3'-phosphate
  modified_base 16: mod_base = OTHER; note = adenosine-3'-phosphate
  modified_base 17: mod_base = OTHER; note = guanosine-3'-phosphate
  modified_base 18: mod_base = OTHER; note = guanosine-3'-phosphate
  modified_base 19: mod_base = OTHER; note = guanosine-3'-phosphate
  misc_feature 1..19: note = RNA
  misc_feature 20..21: note = DNA
agttagctggagatgagggtt

SEQ ID NO: 959 - DNA, 21 bp, synthetic construct
  source 1..21: mol_type = other DNA
  modified_base 1: mod_base = OTHER; note = cytidine-3'-phosphate
  modified_base 2: mod_base = OTHER; note = adenosine-3'-phosphate
  modified_base 3: mod_base = OTHER; note = uridine-3'-phosphate
  modified_base 4: mod_base = OTHER; note = cytidine-3'-phosphate
  modified_base 5: mod_base = OTHER; note = uridine-3'-phosphate
  modified_base 6: mod_base = OTHER; note = cytidine-3'-phosphate
  modified_base 7: mod_base = OTHER; note = cytidine-3'-phosphate
  modified_base 8: mod_base = OTHER; note = adenosine-3'-phosphate
  modified_base 9: mod_base = OTHER; note = guanosine-3'-phosphate
  modified_base 10: mod_base = OTHER; note = cytidine-3'-phosphate
  modified_base 11: mod_base = OTHER; note = uridine-3'-phosphate
  modified_base 12: mod_base = OTHER; note = adenosine-3'-phosphate
  modified_base 13: mod_base = OTHER; note = adenosine-3'-phosphate
  modified_base 14: mod_base = OTHER; note = cytidine-3'-phosphate
  modified_base 15: mod_base = OTHER; note = uridine-3'-phosphate
  modified_base 16: mod_base = OTHER; note = guanosine-3'-phosphate
  modified_base 17: mod_base = OTHER; note = uridine-3'-phosphate
  modified_base 18: mod_base = OTHER; note = guanosine-3'-phosphate
  modified_base 19: mod_base = OTHER; note = guanosine-3'-phosphate
  misc_feature 1..19: note = RNA
  misc_feature 20..21: note = DNA
catctccagctaactgtggtt

SEQ ID NO: 960 - DNA, 21 bp, synthetic construct
  source 1..21: mol_type = other DNA
  modified_base 1: mod_base = OTHER; note = cytidine-3'-phosphate
  modified_base 2: mod_base = OTHER; note = cytidine-3'-phosphate
  modified_base 3: mod_base = OTHER; note = adenosine-3'-phosphate
  modified_base 4: mod_base = OTHER; note = cytidine-3'-phosphate
  modified_base 5: mod_base = OTHER; note = adenosine-3'-phosphate
  modified_base 6: mod_base = OTHER; note = guanosine-3'-phosphate
  modified_base 7: mod_base = OTHER; note = uridine-3'-phosphate
  modified_base 8: mod_base = OTHER; note = uridine-3'-phosphate
  modified_base 9: mod_base = OTHER; note = adenosine-3'-phosphate
  modified_base 10: mod_base = OTHER; note = guanosine-3'-phosphate
  modified_base 11: mod_base = OTHER; note = cytidine-3'-phosphate
  modified_base 12: mod_base = OTHER; note = uridine-3'-phosphate
  modified_base 13: mod_base = OTHER; note = guanosine-3'-phosphate
  modified_base 14: mod_base = OTHER; note = guanosine-3'-phosphate
  modified_base 15: mod_base = OTHER; note = adenosine-3'-phosphate
  modified_base 16: mod_base = OTHER; note = guanosine-3'-phosphate
  modified_base 17: mod_base = OTHER; note = adenosine-3'-phosphate
  modified_base 18: mod_base = OTHER; note = uridine-3'-phosphate
  modified_base 19: mod_base = OTHER; note = guanosine-3'-phosphate
  misc_feature 1..19: note = RNA
  misc_feature 20..21: note = DNA
ccacagttagctggagatgtt

SEQ ID NO: 961 - DNA, 21 bp, synthetic construct
  source 1..21: mol_type = other DNA
  modified_base 1: mod_base = OTHER; note = guanosine-3'-phosphate
  modified_base 2: mod_base = OTHER; note = cytidine-3'-phosphate
  modified_base 3: mod_base = OTHER; note = uridine-3'-phosphate
  modified_base 4: mod_base = OTHER; note = cytidine-3'-phosphate
  modified_base 5: mod_base = OTHER; note = cytidine-3'-phosphate
  modified_base 6: mod_base = OTHER; note = cytidine-3'-phosphate
  modified_base 7: mod_base = OTHER; note = uridine-3'-phosphate
  modified_base 8: mod_base = OTHER; note = guanosine-3'-phosphate
  modified_base 9: mod_base = OTHER; note = adenosine-3'-phosphate
  modified_base 10: mod_base = OTHER; note = uridine-3'-phosphate
  modified_base 11: mod_base = OTHER; note = uridine-3'-phosphate
  modified_base 12: mod_base = OTHER; note = adenosine-3'-phosphate
  modified_base 13: mod_base = OTHER; note = adenosine-3'-phosphate
  modified_base 14: mod_base = OTHER; note = uridine-3'-phosphate
  modified_base 15: mod_base = OTHER; note = guanosine-3'-phosphate
  modified_base 16: mod_base = OTHER; note = guanosine-3'-phosphate
  modified_base 17: mod_base = OTHER; note = adenosine-3'-phosphate
  modified_base 18: mod_base = OTHER; note = guanosine-3'-phosphate
  modified_base 19: mod_base = OTHER; note = guanosine-3'-phosphate
  misc_feature 1..19: note = RNA
  misc_feature 20..21: note = DNA
gctccctgattaatggaggtt

SEQ ID NO: 962 - DNA, 21 bp, synthetic construct
  source 1..21: mol_type = other DNA
  modified_base 1: mod_base = OTHER; note = cytidine-3'-phosphate
  modified_base 2: mod_base = OTHER; note = cytidine-3'-phosphate
  modified_base 3: mod_base = OTHER; note = uridine-3'-phosphate
  modified_base 4: mod_base = OTHER; note = cytidine-3'-phosphate
  modified_base 5: mod_base = OTHER; note = cytidine-3'-phosphate
  modified_base 6: mod_base = OTHER; note = adenosine-3'-phosphate
  modified_base 7: mod_base = OTHER; note = uridine-3'-phosphate
  modified_base 8: mod_base = OTHER; note = uridine-3'-phosphate
  modified_base 9: mod_base = OTHER; note = adenosine-3'-phosphate
  modified_base 10: mod_base = OTHER; note = adenosine-3'-phosphate
  modified_base 11: mod_base = OTHER; note = uridine-3'-phosphate
  modified_base 12: mod_base = OTHER; note = cytidine-3'-phosphate
  modified_base 13: mod_base = OTHER; note = adenosine-3'-phosphate
  modified_base 14: mod_base = OTHER; note = guanosine-3'-phosphate
  modified_base 15: mod_base = OTHER; note = guanosine-3'-phosphate
  modified_base 16: mod_base = OTHER; note = guanosine-3'-phosphate
  modified_base 17: mod_base = OTHER; note = adenosine-3'-phosphate
  modified_base 18: mod_base = OTHER; note = guanosine-3'-phosphate
  modified_base 19: mod_base = OTHER; note = cytidine-3'-phosphate
  misc_feature 1..19: note = RNA
  misc_feature 20..21: note = DNA
cctccattaatcagggagctt

SEQ ID NO: 963 - DNA, 21 bp, synthetic construct
  source 1..21: mol_type = other DNA
  modified_base 1: mod_base = OTHER; note = cytidine-3'-phosphate
  modified_base 2: mod_base = OTHER; note = cytidine-3'-phosphate
  modified_base 3: mod_base = OTHER; note = cytidine-3'-phosphate
  modified_base 4: mod_base = OTHER; note = uridine-3'-phosphate
  modified_base 5: mod_base = OTHER; note = guanosine-3'-phosphate
  modified_base 6: mod_base = OTHER; note = adenosine-3'-phosphate
  modified_base 7: mod_base = OTHER; note = uridine-3'-phosphate
  modified_base 8: mod_base = OTHER; note = uridine-3'-phosphate
  modified_base 9: mod_base = OTHER; note = adenosine-3'-phosphate
  modified_base 10: mod_base = OTHER; note = adenosine-3'-phosphate
  modified_base 11: mod_base = OTHER; note = uridine-3'-phosphate
  modified_base 12: mod_base = OTHER; note = guanosine-3'-phosphate
  modified_base 13: mod_base = OTHER; note = guanosine-3'-phosphate
  modified_base 14: mod_base = OTHER; note = adenosine-3'-phosphate
  modified_base 15: mod_base = OTHER; note = guanosine-3'-phosphate
  modified_base 16: mod_base = OTHER; note = guanosine-3'-phosphate
  modified_base 17: mod_base = OTHER; note = cytidine-3'-phosphate
  modified_base 18: mod_base = OTHER; note = uridine-3'-phosphate
  modified_base 19: mod_base = OTHER; note = uridine-3'-phosphate
  misc_feature 1..19: note = RNA
  misc_feature 20..21: note = DNA
ccctgattaatggaggctttt

SEQ ID NO: 964 - DNA, 21 bp, synthetic construct
  source 1..21: mol_type = other DNA
  modified_base 1: mod_base = OTHER; note = adenosine-3'-phosphate
  modified_base 2: mod_base = OTHER; note = adenosine-3'-phosphate
  modified_base 3: mod_base = OTHER; note = guanosine-3'-phosphate
  modified_base 4: mod_base = OTHER; note = cytidine-3'-phosphate
  modified_base 5: mod_base = OTHER; note = cytidine-3'-phosphate
  modified_base 6: mod_base = OTHER; note = uridine-3'-phosphate
  modified_base 7: mod_base = OTHER; note = cytidine-3'-phosphate
  modified_base 8: mod_base = OTHER; note = cytidine-3'-phosphate
  modified_base 9: mod_base = OTHER; note = adenosine-3'-phosphate
  modified_base 10: mod_base = OTHER; note = uridine-3'-phosphate
  modified_base 11: mod_base = OTHER; note = uridine-3'-phosphate
  modified_base 12: mod_base = OTHER; note = adenosine-3'-phosphate
  modified_base 13: mod_base = OTHER; note = adenosine-3'-phosphate
  modified_base 14: mod_base = OTHER; note = uridine-3'-phosphate
  modified_base 15: mod_base = OTHER; note = cytidine-3'-phosphate
  modified_base 16: mod_base = OTHER; note = adenosine-3'-phosphate
  modified_base 17: mod_base = OTHER; note = guanosine-3'-phosphate
  modified_base 18: mod_base = OTHER; note = guanosine-3'-phosphate
  modified_base 19: mod_base = OTHER; note = guanosine-3'-phosphate
  misc_feature 1..19: note = RNA
  misc_feature 20..21: note = DNA
aagcctccattaatcagggtt

SEQ ID NO: 965 - DNA, 21 bp, synthetic construct
  source 1..21: mol_type = other DNA
  modified_base 1: mod_base = OTHER; note = cytidine-3'-phosphate
  modified_base 2: mod_base = OTHER; note = cytidine-3'-phosphate
  modified_base 3: mod_base = OTHER; note = uridine-3'-phosphate
  modified_base 4: mod_base = OTHER; note = guanosine-3'-phosphate
  modified_base 5: mod_base = OTHER; note = adenosine-3'-phosphate
  modified_base 6: mod_base = OTHER; note = uridine-3'-phosphate
  modified_base 7: mod_base = OTHER; note = uridine-3'-phosphate
  modified_base 8: mod_base = OTHER; note = adenosine-3'-phosphate
  modified_base 9: mod_base = OTHER; note = adenosine-3'-phosphate
  modified_base 10: mod_base = OTHER; note = uridine-3'-phosphate
  modified_base 11: mod_base = OTHER; note = guanosine-3'-phosphate
  modified_base 12: mod_base = OTHER; note = guanosine-3'-phosphate
  modified_base 13: mod_base = OTHER; note = adenosine-3'-phosphate
  modified_base 14: mod_base = OTHER; note = guanosine-3'-phosphate
  modified_base 15: mod_base = OTHER; note = guanosine-3'-phosphate
  modified_base 16: mod_base = OTHER; note = cytidine-3'-phosphate
  modified_base 17: mod_base = OTHER; note = uridine-3'-phosphate
  modified_base 18: mod_base = OTHER; note = uridine-3'-phosphate
  modified_base 19: mod_base = OTHER; note = adenosine-3'-phosphate
  misc_feature 1..19: note = RNA
  misc_feature 20..21: note = DNA
cctgattaatggaggcttatt

SEQ ID NO: 966 - DNA, 21 bp, synthetic construct
  source 1..21: mol_type = other DNA
  modified_base 1: mod_base = OTHER; note = uridine-3'-phosphate
  modified_base 2: mod_base = OTHER; note = adenosine-3'-phosphate
  modified_base 3: mod_base = OTHER; note = adenosine-3'-phosphate
  modified_base 4: mod_base = OTHER; note = guanosine-3'-phosphate
  modified_base 5: mod_base = OTHER; note = cytidine-3'-phosphate
  modified_base 6: mod_base = OTHER; note = cytidine-3'-phosphate
  modified_base 7: mod_base = OTHER; note = uridine-3'-phosphate
  modified_base 8: mod_base = OTHER; note = cytidine-3'-phosphate
  modified_base 9: mod_base = OTHER; note = cytidine-3'-phosphate
  modified_base 10: mod_base = OTHER; note = adenosine-3'-phosphate
  modified_base 11: mod_base = OTHER; note = uridine-3'-phosphate
  modified_base 12: mod_base = OTHER; note = uridine-3'-phosphate
  modified_base 13: mod_base = OTHER; note = adenosine-3'-phosphate
  modified_base 14: mod_base = OTHER; note = adenosine-3'-phosphate
  modified_base 15: mod_base = OTHER; note = uridine-3'-phosphate
  modified_base 16: mod_base = OTHER; note = cytidine-3'-phosphate
  modified_base 17: mod_base = OTHER; note = adenosine-3'-phosphate
  modified_base 18: mod_base = OTHER; note = guanosine-3'-phosphate
  modified_base 19: mod_base = OTHER; note = guanosine-3'-phosphate
  misc_feature 1..19: note = RNA
  misc_feature 20..21: note = DNA
taagcctccattaatcaggtt

SEQ ID NO: 967 - DNA, 21 bp, synthetic construct
  source 1..21: mol_type = other DNA
  modified_base 1: mod_base = OTHER; note = uridine-3'-phosphate
  modified_base 2: mod_base = OTHER; note = guanosine-3'-phosphate
  modified_base 3: mod_base = OTHER; note = adenosine-3'-phosphate
  modified_base 4: mod_base = OTHER; note = uridine-3'-phosphate
  modified_base 5: mod_base = OTHER; note = uridine-3'-phosphate
  modified_base 6: mod_base = OTHER; note = adenosine-3'-phosphate
  modified_base 7: mod_base = OTHER; note = adenosine-3'-phosphate
  modified_base 8: mod_base = OTHER; note = uridine-3'-phosphate
  modified_base 9: mod_base = OTHER; note = guanosine-3'-phosphate
  modified_base 10: mod_base = OTHER; note = guanosine-3'-phosphate
  modified_base 11: mod_base = OTHER; note = adenosine-3'-phosphate
  modified_base 12: mod_base = OTHER; note = guanosine-3'-phosphate
  modified_base 13: mod_base = OTHER; note = guanosine-3'-phosphate
  modified_base 14: mod_base = OTHER; note = cytidine-3'-phosphate
  modified_base 15: mod_base = OTHER; note = uridine-3'-phosphate
  modified_base 16: mod_base = OTHER; note = uridine-3'-phosphate
  modified_base 17: mod_base = OTHER; note = adenosine-3'-phosphate
  modified_base 18: mod_base = OTHER; note = guanosine-3'-phosphate
  modified_base 19: mod_base = OTHER; note = cytidine-3'-phosphate
  misc_feature 1..19: note = RNA
  misc_feature 20..21: note = DNA
tgattaatggaggcttagctt

SEQ ID NO: 968 - DNA, 21 bp, synthetic construct
  source 1..21: mol_type = other DNA
  modified_base 1: mod_base = OTHER; note = guanosine-3'-phosphate
  modified_base 2: mod_base = OTHER; note = cytidine-3'-phosphate
  modified_base 3: mod_base = OTHER; note = uridine-3'-phosphate
  modified_base 4: mod_base = OTHER; note = adenosine-3'-phosphate
  modified_base 5: mod_base = OTHER; note = adenosine-3'-phosphate
  modified_base 6: mod_base = OTHER; note = guanosine-3'-phosphate
  modified_base 7: mod_base = OTHER; note = cytidine-3'-phosphate
  modified_base 8: mod_base = OTHER; note = cytidine-3'-phosphate
  modified_base 9: mod_base = OTHER; note = uridine-3'-phosphate
  modified_base 10: mod_base = OTHER; note = cytidine-3'-phosphate
  modified_base 11: mod_base = OTHER; note = cytidine-3'-phosphate
  modified_base 12: mod_base = OTHER; note = adenosine-3'-phosphate
  modified_base 13: mod_base = OTHER; note = uridine-3'-phosphate
  modified_base 14: mod_base = OTHER; note = uridine-3'-phosphate
  modified_base 15: mod_base = OTHER; note = adenosine-3'-phosphate
  modified_base 16: mod_base = OTHER; note = adenosine-3'-phosphate
  modified_base 17: mod_base = OTHER; note = uridine-3'-phosphate
  modified_base 18: mod_base = OTHER; note = cytidine-3'-phosphate
  modified_base 19: mod_base = OTHER; note = adenosine-3'-phosphate
  misc_feature 1..19: note = RNA
  misc_feature 20..21: note = DNA
gctaagcctccattaatcatt

SEQ ID NO: 969 - DNA, 21 bp, synthetic construct
  source 1..21: mol_type = other DNA
  modified_base 1: mod_base = OTHER; note = guanosine-3'-phosphate
  modified_base 2: mod_base = OTHER; note = adenosine-3'-phosphate
  modified_base 3: mod_base = OTHER; note = uridine-3'-phosphate
  modified_base 4: mod_base = OTHER; note = uridine-3'-phosphate
  modified_base 5: mod_base = OTHER; note = adenosine-3'-phosphate
  modified_base 6: mod_base = OTHER; note = adenosine-3'-phosphate
  modified_base 7: mod_base = OTHER; note = uridine-3'-phosphate
  modified_base 8: mod_base = OTHER; note = guanosine-3'-phosphate
  modified_base 9: mod_base = OTHER; note = guanosine-3'-phosphate
  modified_base 10: mod_base = OTHER; note = adenosine-3'-phosphate
  modified_base 11: mod_base = OTHER; note = guanosine-3'-phosphate
  modified_base 12: mod_base = OTHER; note = guanosine-3'-phosphate
  modified_base 13: mod_base = OTHER; note = cytidine-3'-phosphate
  modified_base 14: mod_base = OTHER; note = uridine-3'-phosphate
  modified_base 15: mod_base = OTHER; note = uridine-3'-phosphate
  modified_base 16: mod_base = OTHER; note = adenosine-3'-phosphate
  modified_base 17: mod_base = OTHER; note = guanosine-3'-phosphate
  modified_base 18: mod_base = OTHER; note = cytidine-3'-phosphate
  modified_base 19: mod_base = OTHER; note = uridine-3'-phosphate
  misc_feature 1..19: note = RNA
  misc_feature 20..21: note = DNA
gattaatggaggcttagcttt

SEQ ID NO: 970 - DNA, 21 bp, synthetic construct
  source 1..21: mol_type = other DNA
  modified_base 1: mod_base = OTHER; note = adenosine-3'-phosphate
  modified_base 2: mod_base = OTHER; note = guanosine-3'-phosphate
  modified_base 3: mod_base = OTHER; note = cytidine-3'-phosphate
  modified_base 4: mod_base = OTHER; note = uridine-3'-phosphate
  modified_base 5: mod_base = OTHER; note = adenosine-3'-phosphate
  modified_base 6: mod_base = OTHER; note = adenosine-3'-phosphate
  modified_base 7: mod_base = OTHER; note = guanosine-3'-phosphate
  modified_base 8: mod_base = OTHER; note = cytidine-3'-phosphate
  modified_base 9: mod_base = OTHER; note = cytidine-3'-phosphate
  modified_base 10: mod_base = OTHER; note = uridine-3'-phosphate
  modified_base 11: mod_base = OTHER; note = cytidine-3'-phosphate
  modified_base 12: mod_base = OTHER; note = cytidine-3'-phosphate
  modified_base 13: mod_base = OTHER; note = adenosine-3'-phosphate
  modified_base 14: mod_base = OTHER; note = uridine-3'-phosphate
  modified_base 15: mod_base = OTHER; note = uridine-3'-phosphate
  modified_base 16: mod_base = OTHER; note = adenosine-3'-phosphate
  modified_base 17: mod_base = OTHER; note = adenosine-3'-phosphate
  modified_base 18: mod_base = OTHER; note = uridine-3'-phosphate
  modified_base 19: mod_base = OTHER; note = cytidine-3'-phosphate
  misc_feature 1..19: note = RNA
  misc_feature 20..21: note = DNA
agctaagcctccattaatctt

SEQ ID NO: 971 - DNA, 21 bp, synthetic construct
  source 1..21: mol_type = other DNA
  modified_base 1: mod_base = OTHER; note = adenosine-3'-phosphate
  modified_base 2: mod_base = OTHER; note = uridine-3'-phosphate
  modified_base 3: mod_base = OTHER; note = uridine-3'-phosphate
  modified_base 4: mod_base = OTHER; note = adenosine-3'-phosphate
  modified_base 5: mod_base = OTHER; note = adenosine-3'-phosphate
  modified_base 6: mod_base = OTHER; note = uridine-3'-phosphate
  modified_base 7: mod_base = OTHER; note = guanosine-3'-phosphate
  modified_base 8: mod_base = OTHER; note = guanosine-3'-phosphate
  modified_base 9: mod_base = OTHER; note = adenosine-3'-phosphate
  modified_base 10: mod_base = OTHER; note = guanosine-3'-phosphate
  modified_base 11: mod_base = OTHER; note = guanosine-3'-phosphate
  modified_base 12: mod_base = OTHER; note = cytidine-3'-phosphate
  modified_base 13: mod_base = OTHER; note = uridine-3'-phosphate
  modified_base 14: mod_base = OTHER; note = uridine-3'-phosphate
  modified_base 15: mod_base = OTHER; note = adenosine-3'-phosphate
  modified_base 16: mod_base = OTHER; note = guanosine-3'-phosphate
  modified_base 17: mod_base = OTHER; note = cytidine-3'-phosphate
  modified_base 18: mod_base = OTHER; note = uridine-3'-phosphate
  modified_base 19: mod_base = OTHER; note = uridine-3'-phosphate
  misc_feature 1..19: note = RNA
  misc_feature 20..21: note = DNA
attaatggaggcttagctttt

SEQ ID NO: 972 - DNA, 21 bp, synthetic construct
  source 1..21: mol_type = other DNA
  modified_base 1: mod_base = OTHER; note = adenosine-3'-phosphate
  modified_base 2: mod_base = OTHER; note = adenosine-3'-phosphate
  modified_base 3: mod_base = OTHER; note = guanosine-3'-phosphate
  modified_base 4: mod_base = OTHER; note = cytidine-3'-phosphate
  modified_base 5: mod_base = OTHER; note = uridine-3'-phosphate
  modified_base 6: mod_base = OTHER; note = adenosine-3'-phosphate
  modified_base 7: mod_base = OTHER; note = adenosine-3'-phosphate
  modified_base 8: mod_base = OTHER; note = guanosine-3'-phosphate
  modified_base 9: mod_base = OTHER; note = cytidine-3'-phosphate
  modified_base 10: mod_base = OTHER; note = cytidine-3'-phosphate
  modified_base 11: mod_base = OTHER; note = uridine-3'-phosphate
  modified_base 12: mod_base = OTHER; note = cytidine-3'-phosphate
  modified_base 13: mod_base = OTHER; note = cytidine-3'-phosphate
  modified_base 14: mod_base = OTHER; note = adenosine-3'-phosphate
  modified_base 15: mod_base = OTHER; note = uridine-3'-phosphate
  modified_base 16: mod_base = OTHER; note = uridine-3'-phosphate
  modified_base 17: mod_base = OTHER; note = adenosine-3'-phosphate
  modified_base 18: mod_base = OTHER; note = adenosine-3'-phosphate
  modified_base 19: mod_base = OTHER; note = uridine-3'-phosphate
  misc_feature 1..19: note = RNA
  misc_feature 20..21: note = DNA
aagctaagcctccattaattt

SEQ ID NO: 973 - DNA, 21 bp, synthetic construct
  source 1..21: mol_type = other DNA
  modified_base 1: mod_base = OTHER; note = uridine-3'-phosphate
  modified_base 2: mod_base = OTHER; note = uridine-3'-phosphate
  modified_base 3: mod_base = OTHER; note = adenosine-3'-phosphate
  modified_base 4: mod_base = OTHER; note = adenosine-3'-phosphate
  modified_base 5: mod_base = OTHER; note = uridine-3'-phosphate
  modified_base 6: mod_base = OTHER; note = guanosine-3'-phosphate
  modified_base 7: mod_base = OTHER; note = guanosine-3'-phosphate
  modified_base 8: mod_base = OTHER; note = adenosine-3'-phosphate
  modified_base 9: mod_base = OTHER; note = guanosine-3'-phosphate
  modified_base 10: mod_base = OTHER; note = guanosine-3'-phosphate
  modified_base 11: mod_base = OTHER; note = cytidine-3'-phosphate
  modified_base 12: mod_base = OTHER; note = uridine-3'-phosphate
  modified_base 13: mod_base = OTHER; note = uridine-3'-phosphate
  modified_base 14: mod_base = OTHER; note = adenosine-3'-phosphate
  modified_base 15: mod_base = OTHER; note = guanosine-3'-phosphate
  modified_base 16: mod_base = OTHER; note = cytidine-3'-phosphate
  modified_base 17: mod_base = OTHER; note = uridine-3'-phosphate
  modified_base 18: mod_base = OTHER; note = uridine-3'-phosphate
  modified_base 19: mod_base = OTHER; note = uridine-3'-phosphate
  misc_feature 1..19: note = RNA
  misc_feature 20..21: note = DNA
ttaatggaggcttagcttttt

SEQ ID NO: 974 - DNA, 21 bp, synthetic construct
  source 1..21: mol_type = other DNA
  modified_base 1: mod_base = OTHER; note = adenosine-3'-phosphate
  modified_base 2: mod_base = OTHER; note = adenosine-3'-phosphate
  modified_base 3: mod_base = OTHER; note = adenosine-3'-phosphate
  modified_base 4: mod_base = OTHER; note = guanosine-3'-phosphate
  modified_base 5: mod_base = OTHER; note = cytidine-3'-phosphate
  modified_base 6: mod_base = OTHER; note = uridine-3'-phosphate
  modified_base 7: mod_base = OTHER; note = adenosine-3'-phosphate
  modified_base 8: mod_base = OTHER; note = adenosine-3'-phosphate
  modified_base 9: mod_base = OTHER; note = guanosine-3'-phosphate
  modified_base 10: mod_base = OTHER; note = cytidine-3'-phosphate
  modified_base 11: mod_base = OTHER; note = cytidine-3'-phosphate
  modified_base 12: mod_base = OTHER; note = uridine-3'-phosphate
  modified_base 13: mod_base = OTHER; note = cytidine-3'-phosphate
  modified_base 14: mod_base = OTHER; note = cytidine-3'-phosphate
  modified_base 15: mod_base = OTHER; note = adenosine-3'-phosphate
  modified_base 16: mod_base = OTHER; note = uridine-3'-phosphate
  modified_base 17: mod_base = OTHER; note = uridine-3'-phosphate
  modified_base 18: mod_base = OTHER; note = adenosine-3'-phosphate
  modified_base 19: mod_base = OTHER; note = adenosine-3'-phosphate
  misc_feature 1..19: note = RNA
  misc_feature 20..21: note = DNA
aaagctaagcctccattaatt

SEQ ID NO: 975 - DNA, 21 bp, synthetic construct
  source 1..21: mol_type = other DNA
  modified_base 1: mod_base = OTHER; note = uridine-3'-phosphate
  modified_base 2: mod_base = OTHER; note = uridine-3'-phosphate
  modified_base 3: mod_base = OTHER; note = uridine-3'-phosphate
  modified_base 4: mod_base = OTHER; note = cytidine-3'-phosphate
  modified_base 5: mod_base = OTHER; note = uridine-3'-phosphate
  modified_base 6: mod_base = OTHER; note = guanosine-3'-phosphate
  modified_base 7: mod_base = OTHER; note = guanosine-3'-phosphate
  modified_base 8: mod_base = OTHER; note = adenosine-3'-phosphate
  modified_base 9: mod_base = OTHER; note = uridine-3'-phosphate
  modified_base 10: mod_base = OTHER; note = guanosine-3'-phosphate
  modified_base 11: mod_base = OTHER; note = guanosine-3'-phosphate
  modified_base 12: mod_base = OTHER; note = cytidine-3'-phosphate
  modified_base 13: mod_base = OTHER; note = adenosine-3'-phosphate
  modified_base 14: mod_base = OTHER; note = uridine-3'-phosphate
  modified_base 15: mod_base = OTHER; note = cytidine-3'-phosphate
  modified_base 16: mod_base = OTHER; note = uridine-3'-phosphate
  modified_base 17: mod_base = OTHER; note = adenosine-3'-phosphate
  modified_base 18: mod_base = OTHER; note = guanosine-3'-phosphate
  modified_base 19: mod_base = OTHER; note = cytidine-3'-phosphate
  modified_base 20: mod_base = OTHER; note = 2'-deoxythymidine-3'-phosphorothioate
  misc_feature 1..19: note = RNA
  misc_feature 20..21: note = DNA
tttctggatggcatctagctt

SEQ ID NO: 976 - DNA, 21 bp, synthetic construct
  source 1..21: mol_type = other DNA
  modified_base 1: mod_base = OTHER; note = guanosine-3'-phosphate
  modified_base 2: mod_base = OTHER; note = cytidine-3'-phosphate
  modified_base 3: mod_base = OTHER; note = uridine-3'-phosphate
  modified_base 4: mod_base = OTHER; note = adenosine-3'-phosphate
  modified_base 5: mod_base = OTHER; note = guanosine-3'-phosphate
  modified_base 6: mod_base = OTHER; note = adenosine-3'-phosphate
  modified_base 7: mod_base = OTHER; note = uridine-3'-phosphate
  modified_base 8: mod_base = OTHER; note = guanosine-3'-phosphate
  modified_base 9: mod_base = OTHER; note = cytidine-3'-phosphate
  modified_base 10: mod_base = OTHER; note = cytidine-3'-phosphate
  modified_base 11: mod_base = OTHER; note = adenosine-3'-phosphate
  modified_base 12: mod_base = OTHER; note = uridine-3'-phosphate
  modified_base 13: mod_base = OTHER; note = cytidine-3'-phosphate
  modified_base 14: mod_base = OTHER; note = cytidine-3'-phosphate
  modified_base 15: mod_base = OTHER; note = adenosine-3'-phosphate
  modified_base 16: mod_base = OTHER; note = guanosine-3'-phosphate
  modified_base 17: mod_base = OTHER; note = adenosine-3'-phosphate
  modified_base 18: mod_base = OTHER; note = adenosine-3'-phosphate
  modified_base 19: mod_base = OTHER; note = adenosine-3'-phosphate
  modified_base 20: mod_base = OTHER; note = 2'-deoxythymidine-3'-phosphorothioate
  misc_feature 1..19: note = RNA
  misc_feature 20..21: note = DNA
gctagatgccatccagaaatt

SEQ ID NO: 977 - DNA, 21 bp, synthetic construct
  source 1..21: mol_type = other DNA
  modified_base 1: mod_base = OTHER; note = 2'-O-methyluridine-3'-phosphate
  modified_base 2: mod_base = OTHER; note = 2'-O-methyluridine-3'-phosphate
  modified_base 3: mod_base = OTHER; note = 2'-O-methyluridine-3'-phosphate
  modified_base 4: mod_base = OTHER; note = 2'-O-methylcytidine-3'-phosphate
  modified_base 5: mod_base = OTHER; note = 2'-O-methyluridine-3'-phosphate
  modified_base 6: mod_base = OTHER; note = guanosine-3'-phosphate
  modified_base 7: mod_base = OTHER; note = guanosine-3'-phosphate
  modified_base 8: mod_base = OTHER; note = adenosine-3'-phosphate
  modified_base 9: mod_base = OTHER; note = 2'-O-methyluridine-3'-phosphate
  modified_base 10: mod_base = OTHER; note = guanosine-3'-phosphate
  modified_base 11: mod_base = OTHER; note = guanosine-3'-phosphate
  modified_base 12: mod_base = OTHER; note = 2'-O-methylcytidine-3'-phosphate
  modified_base 13: mod_base = OTHER; note = adenosine-3'-phosphate
  modified_base 14: mod_base = OTHER; note = 2'-O-methyluridine-3'-phosphate
  modified_base 15: mod_base = OTHER; note = 2'-O-methylcytidine-3'-phosphate
  modified_base 16: mod_base = OTHER; note = 2'-O-methyluridine-3'-phosphate
  modified_base 17: mod_base = OTHER; note = adenosine-3'-phosphate
  modified_base 18: mod_base = OTHER; note = guanosine-3'-phosphate
  modified_base 19: mod_base = OTHER; note = 2'-O-methylcytidine-3'-phosphate
  modified_base 20: mod_base = OTHER; note = 2'-deoxythymidine-3'-phosphorothioate
  misc_feature 1..19: note = RNA
  misc_feature 20..21: note = DNA
tttctggatggcatctagctt

SEQ ID NO: 978 - DNA, 21 bp, synthetic construct
  source 1..21: mol_type = other DNA
  modified_base 1: mod_base = OTHER; note = guanosine-3'-phosphate
  modified_base 2: mod_base = OTHER; note = cytidine-3'-phosphate
  modified_base 3: mod_base = OTHER; note = 2'-O-methyluridine-3'-phosphate
  modified_base 4: mod_base = OTHER; note = adenosine-3'-phosphate
  modified_base 5: mod_base = OTHER; note = guanosine-3'-phosphate
  modified_base 6: mod_base = OTHER; note = adenosine-3'-phosphate
  modified_base 7: mod_base = OTHER; note = uridine-3'-phosphate
  modified_base 8: mod_base = OTHER; note = guanosine-3'-phosphate
  modified_base 9: mod_base = OTHER; note = cytidine-3'-phosphate
  modified_base 10: mod_base = OTHER; note = 2'-O-methylcytidine-3'-phosphate
  modified_base 11: mod_base = OTHER; note = adenosine-3'-phosphate
  modified_base 12: mod_base = OTHER; note = uridine-3'-phosphate
  modified_base 13: mod_base = OTHER; note = cytidine-3'-phosphate
  modified_base 14: mod_base = OTHER; note = 2'-O-methylcytidine-3'-phosphate
  modified_base 15: mod_base = OTHER; note = adenosine-3'-phosphate
  modified_base 16: mod_base = OTHER; note = guanosine-3'-phosphate
  modified_base 17: mod_base = OTHER; note = adenosine-3'-phosphate
  modified_base 18: mod_base = OTHER; note = adenosine-3'-phosphate
  modified_base 19: mod_base = OTHER; note = adenosine-3'-phosphate
  modified_base 20: mod_base = OTHER; note = 2'-deoxythymidine-3'-phosphorothioate
  misc_feature 1..19: note = RNA
  misc_feature 20..21: note = DNA
gctagatgccatccagaaatt

SEQ ID NO: 979 - DNA, 21 bp, synthetic construct
  source 1..21: mol_type = other DNA
  modified_base 1: mod_base = OTHER; note = uridine-3'-phosphate
  modified_base 2: mod_base = OTHER; note = uridine-3'-phosphate
  modified_base 3: mod_base = OTHER; note = cytidine-3'-phosphate
  modified_base 4: mod_base = OTHER; note = uridine-3'-phosphate
  modified_base 5: mod_base = OTHER; note = guanosine-3'-phosphate
  modified_base 6: mod_base = OTHER; note = guanosine-3'-phosphate
  modified_base 7: mod_base = OTHER; note = adenosine-3'-phosphate
  modified_base 8: mod_base = OTHER; note = uridine-3'-phosphate
  modified_base 9: mod_base = OTHER; note = guanosine-3'-phosphate
  modified_base 10: mod_base = OTHER; note = guanosine-3'-phosphate
  modified_base 11: mod_base = OTHER; note = cytidine-3'-phosphate
  modified_base 12: mod_base = OTHER; note = adenosine-3'-phosphate
  modified_base 13: mod_base = OTHER; note = uridine-3'-phosphate
  modified_base 14: mod_base = OTHER; note = cytidine-3'-phosphate
  modified_base 15: mod_base = OTHER; note = uridine-3'-phosphate
  modified_base 16: mod_base = OTHER; note = adenosine-3'-phosphate
  modified_base 17: mod_base = OTHER; note = guanosine-3'-phosphate
  modified_base 18: mod_base = OTHER; note = cytidine-3'-phosphate
  modified_base 19: mod_base = OTHER; note = cytidine-3'-phosphate
  modified_base 20: mod_base = OTHER; note = 2'-deoxythymidine-3'-phosphorothioate
  misc_feature 1..19: note = RNA
  misc_feature 20..21: note = DNA
ttctggatggcatctagcctt

SEQ ID NO: 980 - DNA, 21 bp, synthetic construct
  source 1..21: mol_type = other DNA
  modified_base 1: mod_base = OTHER; note = guanosine-3'-phosphate
  modified_base 2: mod_base = OTHER; note = guanosine-3'-phosphate
  modified_base 3: mod_base = OTHER; note = cytidine-3'-phosphate
  modified_base 4: mod_base = OTHER; note = uridine-3'-phosphate
  modified_base 5: mod_base = OTHER; note = adenosine-3'-phosphate
  modified_base 6: mod_base = OTHER; note = guanosine-3'-phosphate
  modified_base 7: mod_base = OTHER; note = adenosine-3'-phosphate
  modified_base 8: mod_base = OTHER; note = uridine-3'-phosphate
  modified_base 9: mod_base = OTHER; note = guanosine-3'-phosphate
  modified_base 10: mod_base = OTHER; note = cytidine-3'-phosphate
  modified_base 11: mod_base = OTHER; note = cytidine-3'-phosphate
  modified_base 12: mod_base = OTHER; note = adenosine-3'-phosphate
  modified_base 13: mod_base = OTHER; note = uridine-3'-phosphate
  modified_base 14: mod_base = OTHER; note = cytidine-3'-phosphate
  modified_base 15: mod_base = OTHER; note = cytidine-3'-phosphate
  modified_base 16: mod_base = OTHER; note = adenosine-3'-phosphate
  modified_base 17: mod_base = OTHER; note = guanosine-3'-phosphate
  modified_base 18: mod_base = OTHER; note = adenosine-3'-phosphate
  modified_base 19: mod_base = OTHER; note = adenosine-3'-phosphate
  modified_base 20: mod_base = OTHER; note = 2'-deoxythymidine-3'-phosphorothioate
  misc_feature 1..19: note = RNA
  misc_feature 20..21: note = DNA
ggctagatgccatccagaatt

SEQ ID NO: 981 - DNA, 21 bp, synthetic construct
  source 1..21: mol_type = other DNA
  modified_base 1: mod_base = OTHER; note = 2'-O-methyluridine-3'-phosphate
  modified_base 2: mod_base = OTHER; note = 2'-O-methyluridine-3'-phosphate
  modified_base 3: mod_base = OTHER; note = 2'-O-methylcytidine-3'-phosphate
  modified_base 4: mod_base = OTHER; note = 2'-O-methyluridine-3'-phosphate
  modified_base 5: mod_base = OTHER; note = guanosine-3'-phosphate
  modified_base 6: mod_base = OTHER; note = guanosine-3'-phosphate
  modified_base 7: mod_base = OTHER; note = adenosine-3'-phosphate
  modified_base 8: mod_base = OTHER; note = 2'-O-methyluridine-3'-phosphate
  modified_base 9: mod_base = OTHER; note = guanosine-3'-phosphate
  modified_base 10: mod_base = OTHER; note = guanosine-3'-phosphate
  modified_base 11: mod_base = OTHER; note = 2'-O-methylcytidine-3'-phosphate
  modified_base 12: mod_base = OTHER; note = adenosine-3'-phosphate
  modified_base 13: mod_base = OTHER; note = 2'-O-methyluridine-3'-phosphate
  modified_base 14: mod_base = OTHER; note = 2'-O-methylcytidine-3'-phosphate
  modified_base 15: mod_base = OTHER; note = 2'-O-methyluridine-3'-phosphate
  modified_base 16: mod_base = OTHER; note = adenosine-3'-phosphate
  modified_base 17: mod_base = OTHER; note = guanosine-3'-phosphate
  modified_base 18: mod_base = OTHER; note = 2'-O-methylcytidine-3'-phosphate
  modified_base 19: mod_base = OTHER; note = 2'-O-methylcytidine-3'-phosphate
  modified_base 20: mod_base = OTHER; note = 2'-deoxythymidine-3'-phosphorothioate
  misc_feature 1..19: note = RNA
  misc_feature 20..21: note = DNA
ttctggatggcatctagcctt

SEQ ID NO: 982 - DNA, 21 bp, synthetic construct
  source 1..21: mol_type = other DNA
  modified_base 1: mod_base = OTHER; note = guanosine-3'-phosphate
  modified_base 2: mod_base = OTHER; note = guanosine-3'-phosphate
  modified_base 3: mod_base = OTHER; note = cytidine-3'-phosphate
  modified_base 4: mod_base = OTHER; note = 2'-O-methyluridine-3'-phosphate
  modified_base 5: mod_base = OTHER; note = adenosine-3'-phosphate
  modified_base 6: mod_base = OTHER; note = guanosine-3'-phosphate
  modified_base 7: mod_base = OTHER; note = adenosine-3'-phosphate
  modified_base 8: mod_base = OTHER; note = uridine-3'-phosphate
  modified_base 9: mod_base = OTHER; note = guanosine-3'-phosphate
  modified_base 10: mod_base = OTHER; note = cytidine-3'-phosphate
  modified_base 11: mod_base = OTHER; note = 2'-O-methylcytidine-3'-phosphate
  modified_base 12: mod_base = OTHER; note = adenosine-3'-phosphate
  modified_base 13: mod_base = OTHER; note = uridine-3'-phosphate
  modified_base 14: mod_base = OTHER; note = cytidine-3'-phosphate
  modified_base 15: mod_base = OTHER; note = 2'-O-methylcytidine-3'-phosphate
  modified_base 16: mod_base = OTHER; note = adenosine-3'-phosphate
  modified_base 17: mod_base = OTHER; note = guanosine-3'-phosphate
  modified_base 18: mod_base = OTHER; note = adenosine-3'-phosphate
  modified_base 19: mod_base = OTHER; note = adenosine-3'-phosphate
  modified_base 20: mod_base = OTHER; note = 2'-deoxythymidine-3'-phosphorothioate
  misc_feature 1..19: note = RNA
  misc_feature 20..21: note = DNA
ggctagatgccatccagaatt

SEQ ID NO: 983 - DNA, 21 bp, synthetic construct
  source 1..21: mol_type = other DNA
  modified_base 1: mod_base = OTHER; note = uridine-3'-phosphate
  modified_base 2: mod_base = OTHER; note = cytidine-3'-phosphate
  modified_base 3: mod_base = OTHER; note = uridine-3'-phosphate
  modified_base 4: mod_base = OTHER; note = guanosine-3'-phosphate
  modified_base 5: mod_base = OTHER; note = guanosine-3'-phosphate
  modified_base 6: mod_base = OTHER; note = adenosine-3'-phosphate
  modified_base 7: mod_base = OTHER; note = uridine-3'-phosphate
  modified_base 8: mod_base = OTHER; note = guanosine-3'-phosphate
  modified_base 9: mod_base = OTHER; note = guanosine-3'-phosphate
  modified_base 10: mod_base = OTHER; note = cytidine-3'-phosphate
  modified_base 11: mod_base = OTHER; note = adenosine-3'-phosphate
  modified_base 12: mod_base = OTHER; note = uridine-3'-phosphate
  modified_base 13: mod_base = OTHER; note = cytidine-3'-phosphate
  modified_base 14: mod_base = OTHER; note = uridine-3'-phosphate
  modified_base 15: mod_base = OTHER; note = adenosine-3'-phosphate
  modified_base 16: mod_base = OTHER; note = guanosine-3'-phosphate
  modified_base 17: mod_base = OTHER; note = cytidine-3'-phosphate
  modified_base 18: mod_base = OTHER; note = cytidine-3'-phosphate
  modified_base 19: mod_base = OTHER; note = adenosine-3'-phosphate
  modified_base 20: mod_base = OTHER; note = 2'-deoxythymidine-3'-phosphorothioate
  misc_feature 1..19: note = RNA
  misc_feature 20..21: note = DNA
tctggatggcatctagccatt

SEQ ID NO: 984 - DNA, 21 bp, synthetic construct
  source 1..21: mol_type = other DNA
  modified_base 1: mod_base = OTHER; note = uridine-3'-phosphate
  modified_base 2: mod_base = OTHER; note = guanosine-3'-phosphate
  modified_base 3: mod_base = OTHER; note = guanosine-3'-phosphate
  modified_base 4: mod_base = OTHER; note = cytidine-3'-phosphate
  modified_base 5: mod_base = OTHER; note = uridine-3'-phosphate
  modified_base 6: mod_base = OTHER; note = adenosine-3'-phosphate
  modified_base 7: mod_base = OTHER; note = guanosine-3'-phosphate
  modified_base 8: mod_base = OTHER; note = adenosine-3'-phosphate
  modified_base 9: mod_base = OTHER; note = uridine-3'-phosphate
  modified_base 10: mod_base = OTHER; note = guanosine-3'-phosphate
  modified_base 11: mod_base = OTHER; note = cytidine-3'-phosphate
  modified_base 12: mod_base = OTHER; note = cytidine-3'-phosphate
  modified_base 13: mod_base = OTHER; note = adenosine-3'-phosphate
  modified_base 14: mod_base = OTHER; note = uridine-3'-phosphate
  modified_base 15: mod_base = OTHER; note = cytidine-3'-phosphate
  modified_base 16: mod_base = OTHER; note = cytidine-3'-phosphate
  modified_base 17: mod_base = OTHER; note = adenosine-3'-phosphate
  modified_base 18: mod_base = OTHER; note = guanosine-3'-phosphate
  modified_base 19: mod_base = OTHER; note = adenosine-3'-phosphate
  modified_base 20: mod_base = OTHER; note = 2'-deoxythymidine-3'-phosphorothioate
  misc_feature 1..19: note = RNA
  misc_feature 20..21: note = DNA
tggctagatgccatccagatt

SEQ ID NO: 985 - DNA, 21 bp, synthetic construct
  source 1..21: mol_type = other DNA
  modified_base 1: mod_base = OTHER; note = 2'-O-methyluridine-3'-phosphate
  modified_base 2: mod_base = OTHER; note = 2'-O-methylcytidine-3'-phosphate
  modified_base 3: mod_base = OTHER; note = 2'-O-methyluridine-3'-phosphate
  modified_base 4: mod_base = OTHER; note = guanosine-3'-phosphate
  modified_base 5: mod_base = OTHER; note = guanosine-3'-phosphate
  modified_base 6: mod_base = OTHER; note = adenosine-3'-phosphate
  modified_base 7: mod_base = OTHER; note = 2'-O-methyluridine-3'-phosphate
  modified_base 8: mod_base = OTHER; note = guanosine-3'-phosphate
  modified_base 9: mod_base = OTHER; note = guanosine-3'-phosphate
  modified_base 10: mod_base = OTHER; note = 2'-O-methylcytidine-3'-phosphate
  modified_base 11: mod_base = OTHER; note = adenosine-3'-phosphate
  modified_base 12: mod_base = OTHER; note = 2'-O-methyluridine-3'-phosphate
  modified_base 13: mod_base = OTHER; note = 2'-O-methylcytidine-3'-phosphate
  modified_base 14: mod_base = OTHER; note = 2'-O-methyluridine-3'-phosphate
  modified_base 15: mod_base = OTHER; note = adenosine-3'-phosphate
  modified_base 16: mod_base = OTHER; note = guanosine-3'-phosphate
  modified_base 17: mod_base = OTHER; note = 2'-O-methylcytidine-3'-phosphate
  modified_base 18: mod_base = OTHER; note = 2'-O-methylcytidine-3'-phosphate
  modified_base 19: mod_base = OTHER; note = adenosine-3'-phosphate
  modified_base 20: mod_base = OTHER; note = 2'-deoxythymidine-3'-phosphorothioate
  misc_feature 1..19: note = RNA
  misc_feature 20..21: note = DNA
tctggatggcatctagccatt

SEQ ID NO: 986 - DNA, 21 bp, synthetic construct
  source 1..21: mol_type = other DNA
  modified_base 1: mod_base = OTHER; note = uridine-3'-phosphate
  modified_base 2: mod_base = OTHER; note = guanosine-3'-phosphate
  modified_base 3: mod_base = OTHER; note = guanosine-3'-phosphate
  modified_base 4: mod_base = OTHER; note = cytidine-3'-phosphate
  modified_base 5: mod_base = OTHER; note = 2'-O-methyluridine-3'-phosphate
  modified_base 6: mod_base = OTHER; note = adenosine-3'-phosphate
  modified_base 7: mod_base = OTHER; note = guanosine-3'-phosphate
  modified_base 8: mod_base = OTHER; note = adenosine-3'-phosphate
  modified_base 9: mod_base = OTHER; note = uridine-3'-phosphate
  modified_base 10: mod_base = OTHER; note = guanosine-3'-phosphate
  modified_base 11: mod_base = OTHER; note = cytidine-3'-phosphate
  modified_base 12: mod_base = OTHER; note = 2'-O-methylcytidine-3'-phosphate
  modified_base 13: mod_base = OTHER; note = adenosine-3'-phosphate
  modified_base 14: mod_base = OTHER; note = uridine-3'-phosphate
  modified_base 15: mod_base = OTHER; note = cytidine-3'-phosphate
  modified_base 16: mod_base = OTHER; note = 2'-O-methylcytidine-3'-phosphate
  modified_base 17: mod_base = OTHER; note = adenosine-3'-phosphate
  modified_base 18: mod_base = OTHER; note = guanosine-3'-phosphate
  modified_base 19: mod_base = OTHER; note = adenosine-3'-phosphate
  modified_base 20: mod_base = OTHER; note = 2'-deoxythymidine-3'-phosphorothioate
  misc_feature 1..19: note = RNA
  misc_feature 20..21: note = DNA
tggctagatgccatccagatt

SEQ ID NO: 987 - DNA, 21 bp, synthetic construct
  source 1..21: mol_type = other DNA
  modified_base 1: mod_base = OTHER; note = adenosine-3'-phosphate
  modified_base 2: mod_base = OTHER; note = guanosine-3'-phosphate
  modified_base 3: mod_base = OTHER; note = guanosine-3'-phosphate
  modified_base 4: mod_base = OTHER; note = cytidine-3'-phosphate
  modified_base 5: mod_base = OTHER; note = uridine-3'-phosphate
  modified_base 6: mod_base = OTHER; note = guanosine-3'-phosphate
  modified_base 7: mod_base = OTHER; note = guanosine-3'-phosphate
  modified_base 8: mod_base = OTHER; note = adenosine-3'-phosphate
  modified_base 9: mod_base = OTHER; note = guanosine-3'-phosphate
  modified_base 10: mod_base = OTHER; note = adenosine-3'-phosphate
  modified_base 11: mod_base = OTHER; note = cytidine-3'-phosphate
  modified_base 12: mod_base = OTHER; note = adenosine-3'-phosphate
  modified_base 13: mod_base = OTHER; note = guanosine-3'-phosphate
  modified_base 14: mod_base = OTHER; note = guanosine-3'-phosphate
  modified_base 15: mod_base = OTHER; note = uridine-3'-phosphate
  modified_base 16: mod_base = OTHER; note = guanosine-3'-phosphate
  modified_base 17: mod_base = OTHER; note = cytidine-3'-phosphate
  modified_base 18: mod_base = OTHER; note = guanosine-3'-phosphate
  modified_base 19: mod_base = OTHER; note = cytidine-3'-phosphate
  misc_feature 1..19: note = RNA
  misc_feature 20..21: note = DNA
aggctggagacaggtgcgctt

SEQ ID NO: 988 - DNA, 21 bp, synthetic construct
  source 1..21: mol_type = other DNA
  modified_base 1: mod_base = OTHER; note = guanosine-3'-phosphate
  modified_base 2: mod_base = OTHER; note = cytidine-3'-phosphate
  modified_base 3: mod_base = OTHER; note = guanosine-3'-phosphate
  modified_base 4: mod_base = OTHER; note = cytidine-3'-phosphate
  modified_base 5: mod_base = OTHER; note = adenosine-3'-phosphate
  modified_base 6: mod_base = OTHER; note = cytidine-3'-phosphate
  modified_base 7: mod_base = OTHER; note = cytidine-3'-phosphate
  modified_base 8: mod_base = OTHER; note = uridine-3'-phosphate
  modified_base 9: mod_base = OTHER; note = guanosine-3'-phosphate
  modified_base 10: mod_base = OTHER; note = uridine-3'-phosphate
  modified_base 11: mod_base = OTHER; note = cytidine-3'-phosphate
  modified_base 12: mod_base = OTHER; note = uridine-3'-phosphate
  modified_base 13: mod_base = OTHER; note = cytidine-3'-phosphate
  modified_base 14: mod_base = OTHER; note = cytidine-3'-phosphate
  modified_base 15: mod_base = OTHER; note = adenosine-3'-phosphate
  modified_base 16: mod_base = OTHER; note = guanosine-3'-phosphate
  modified_base 17: mod_base = OTHER; note = cytidine-3'-phosphate
  modified_base 18: mod_base = OTHER; note = cytidine-3'-phosphate
  modified_base 19: mod_base = OTHER; note = uridine-3'-phosphate
  misc_feature 1..19: note = RNA
  misc_feature 20..21: note = DNA
gcgcacctgtctccagccttt

SEQ ID NO: 989 - DNA, 21 bp, synthetic construct
  source 1..21: mol_type = other DNA
  modified_base 1: mod_base = OTHER; note = guanosine-3'-phosphate
  modified_base 2: mod_base = OTHER; note = guanosine-3'-phosphate
  modified_base 3: mod_base = OTHER; note = cytidine-3'-phosphate
  modified_base 4: mod_base = OTHER; note = uridine-3'-phosphate
  modified_base 5: mod_base = OTHER; note = guanosine-3'-phosphate
  modified_base 6: mod_base = OTHER; note = guanosine-3'-phosphate
  modified_base 7: mod_base = OTHER; note = adenosine-3'-phosphate
  modified_base 8: mod_base = OTHER; note = guanosine-3'-phosphate
  modified_base 9: mod_base = OTHER; note = adenosine-3'-phosphate
  modified_base 10: mod_base = OTHER; note = cytidine-3'-phosphate
  modified_base 11: mod_base = OTHER; note = adenosine-3'-phosphate
  modified_base 12: mod_base = OTHER; note = guanosine-3'-phosphate
  modified_base 13: mod_base = OTHER; note = guanosine-3'-phosphate
  modified_base 14: mod_base = OTHER; note = uridine-3'-phosphate
  modified_base 15: mod_base = OTHER; note = guanosine-3'-phosphate
  modified_base 16: mod_base = OTHER; note = cytidine-3'-phosphate
  modified_base 17: mod_base = OTHER; note = guanosine-3'-phosphate
  modified_base 18: mod_base = OTHER; note = cytidine-3'-phosphate
  modified_base 19: mod_base = OTHER; note = cytidine-3'-phosphate
  misc_feature 1..19: note = RNA
  misc_feature 20..21: note = DNA
ggctggagacaggtgcgcctt

SEQ ID NO: 990 - DNA, 21 bp, synthetic construct
  source 1..21: mol_type = other DNA
  modified_base 1: mod_base = OTHER; note = guanosine-3'-phosphate
  modified_base 2: mod_base = OTHER; note = guanosine-3'-phosphate
  modified_base 3: mod_base = OTHER; note = cytidine-3'-phosphate
  modified_base 4: mod_base = OTHER; note = guanosine-3'-phosphate
  modified_base 5: mod_base = OTHER; note = cytidine-3'-phosphate
  modified_base 6: mod_base = OTHER; note = adenosine-3'-phosphate
  modified_base 7: mod_base = OTHER; note = cytidine-3'-phosphate
  modified_base 8: mod_base = OTHER; note = cytidine-3'-phosphate
  modified_base 9: mod_base = OTHER; note = uridine-3'-phosphate
  modified_base 10: mod_base = OTHER; note = guanosine-3'-phosphate
  modified_base 11: mod_base = OTHER; note = uridine-3'-phosphate
  modified_base 12: mod_base = OTHER; note = cytidine-3'-phosphate
  modified_base 13: mod_base = OTHER; note = uridine-3'-phosphate
  modified_base 14: mod_base = OTHER; note = cytidine-3'-phosphate
  modified_base 15: mod_base = OTHER; note = cytidine-3'-phosphate
  modified_base 16: mod_base = OTHER; note = adenosine-3'-phosphate
  modified_base 17: mod_base = OTHER; note = guanosine-3'-phosphate
  modified_base 18: mod_base = OTHER; note = cytidine-3'-phosphate
  modified_base 19: mod_base = OTHER; note = cytidine-3'-phosphate
  misc_feature 1..19: note = RNA
  misc_feature 20..21: note = DNA
ggcgcacctgtctccagcctt

SEQ ID NO: 991 - DNA, 21 bp, synthetic construct
  source 1..21: mol_type = other DNA
  modified_base 1: mod_base = OTHER; note = guanosine-3'-phosphate
  modified_base 2: mod_base = OTHER; note = cytidine-3'-phosphate
  modified_base 3: mod_base = OTHER; note = uridine-3'-phosphate
  modified_base 4: mod_base = OTHER; note = guanosine-3'-phosphate
  modified_base 5: mod_base = OTHER; note = guanosine-3'-phosphate
  modified_base 6: mod_base = OTHER; note = adenosine-3'-phosphate
  modified_base 7: mod_base = OTHER; note = guanosine-3'-phosphate
  modified_base 8: mod_base = OTHER; note = adenosine-3'-phosphate
  modified_base 9: mod_base = OTHER; note = cytidine-3'-phosphate
  modified_base 10: mod_base = OTHER; note = adenosine-3'-phosphate
  modified_base 11: mod_base = OTHER; note = guanosine-3'-phosphate
  modified_base 12: mod_base = OTHER; note = guanosine-3'-phosphate
  modified_base 13: mod_base = OTHER; note = uridine-3'-phosphate
  modified_base 14: mod_base = OTHER; note = guanosine-3'-phosphate
  modified_base 15: mod_base = OTHER; note = cytidine-3'-phosphate
  modified_base 16: mod_base = OTHER; note = guanosine-3'-phosphate
  modified_base 17: mod_base = OTHER; note = cytidine-3'-phosphate
  modified_base 18: mod_base = OTHER; note = cytidine-3'-phosphate
  modified_base 19: mod_base = OTHER; note = cytidine-3'-phosphate
  misc_feature 1..19: note = RNA
  misc_feature 20..21: note = DNA
gctggagacaggtgcgccctt

SEQ ID NO: 992 - DNA, 21 bp, synthetic construct
  source 1..21: mol_type = other DNA
  modified_base 1: mod_base = OTHER; note = guanosine-3'-phosphate
  modified_base 2: mod_base = OTHER; note = guanosine-3'-phosphate
  modified_base 3: mod_base = OTHER; note = guanosine-3'-phosphate
  modified_base 4: mod_base = OTHER; note = cytidine-3'-phosphate
  modified_base 5: mod_base = OTHER; note = guanosine-3'-phosphate
  modified_base 6: mod_base = OTHER; note = cytidine-3'-phosphate
  modified_base 7: mod_base = OTHER; note = adenosine-3'-phosphate
  modified_base 8: mod_base = OTHER; note = cytidine-3'-phosphate
  modified_base 9: mod_base = OTHER; note = cytidine-3'-phosphate
  modified_base 10: mod_base = OTHER; note = uridine-3'-phosphate
  modified_base 11: mod_base = OTHER; note = guanosine-3'-phosphate
  modified_base 12: mod_base = OTHER; note = uridine-3'-phosphate
  modified_base 13: mod_base = OTHER; note = cytidine-3'-phosphate
  modified_base 14: mod_base = OTHER; note = uridine-3'-phosphate
  modified_base 15: mod_base = OTHER; note = cytidine-3'-phosphate
  modified_base 16: mod_base = OTHER; note = cytidine-3'-phosphate
  modified_base 17: mod_base = OTHER; note = adenosine-3'-phosphate
  modified_base 18: mod_base = OTHER; note = guanosine-3'-phosphate
  modified_base 19: mod_base = OTHER; note = cytidine-3'-phosphate
  misc_feature 1..19: note = RNA
  misc_feature 20..21: note = DNA
gggcgcacctgtctccagctt

SEQ ID NO: 993 - DNA, 21 bp, synthetic construct
  source 1..21: mol_type = other DNA
  modified_base 1: mod_base = OTHER; note = uridine-3'-phosphate
  modified_base 2: mod_base = OTHER; note = uridine-3'-phosphate
  modified_base 3: mod_base = OTHER; note = cytidine-3'-phosphate
  modified_base 4: mod_base = OTHER; note = cytidine-3'-phosphate
  modified_base 5: mod_base = OTHER; note = uridine-3'-phosphate
  modified_base 6: mod_base = OTHER; note = guanosine-3'-phosphate
  modified_base 7: mod_base = OTHER; note = adenosine-3'-phosphate
  modified_base 8: mod_base = OTHER; note = guanosine-3'-phosphate
  modified_base 9: mod_base = OTHER; note = cytidine-3'-phosphate
  modified_base 10: mod_base = OTHER; note = cytidine-3'-phosphate
  modified_base 11: mod_base = OTHER; note = adenosine-3'-phosphate
  modified_base 12: mod_base = OTHER; note = cytidine-3'-phosphate
  modified_base 13: mod_base = OTHER; note = cytidine-3'-phosphate
  modified_base 14: mod_base = OTHER; note = uridine-3'-phosphate
  modified_base 15: mod_base = OTHER; note = uridine-3'-phosphate
  modified_base 16: mod_base = OTHER; note = uridine-3'-phosphate
  modified_base 17: mod_base = OTHER; note = adenosine-3'-phosphate
  modified_base 18: mod_base = OTHER; note = cytidine-3'-phosphate
  modified_base 19: mod_base = OTHER; note = uridine-3'-phosphate
  misc_feature 1..19: note = RNA
  misc_feature 20..21: note = DNA
ttcctgagccacctttacttt

SEQ ID NO: 994 - DNA, 21 bp, synthetic construct
  source 1..21: mol_type = other DNA
  modified_base 1: mod_base = OTHER; note = adenosine-3'-phosphate
  modified_base 2: mod_base = OTHER; note = guanosine-3'-phosphate
  modified_base 3: mod_base = OTHER; note = uridine-3'-phosphate
  modified_base 4: mod_base = OTHER; note = adenosine-3'-phosphate
  modified_base 5: mod_base = OTHER; note = adenosine-3'-phosphate
  modified_base 6: mod_base = OTHER; note = adenosine-3'-phosphate
  modified_base 7: mod_base = OTHER; note = guanosine-3'-phosphate
  modified_base 8: mod_base = OTHER; note = guanosine-3'-phosphate
  modified_base 9: mod_base = OTHER; note = uridine-3'-phosphate
  modified_base 10: mod_base = OTHER; note = guanosine-3'-phosphate
  modified_base 11: mod_base = OTHER; note = guanosine-3'-phosphate
  modified_base 12: mod_base = OTHER; note = cytidine-3'-phosphate
  modified_base 13: mod_base = OTHER; note = uridine-3'-phosphate
  modified_base 14: mod_base = OTHER; note = cytidine-3'-phosphate
  modified_base 15: mod_base = OTHER; note = adenosine-3'-phosphate
  modified_base 16: mod_base = OTHER; note = guanosine-3'-phosphate
  modified_base 17: mod_base = OTHER; note = guanosine-3'-phosphate
  modified_base 18: mod_base = OTHER; note = adenosine-3'-phosphate
  modified_base 19: mod_base = OTHER; note = adenosine-3'-phosphate
  misc_feature 1..19: note = RNA
  misc_feature 20..21: note = DNA
agtaaaggtggctcaggaatt

SEQ ID NO: 995 - DNA, 21 bp, synthetic construct
  source 1..21: mol_type = other DNA
  modified_base 1: mod_base = OTHER; note = uridine-3'-phosphate
  modified_base 2: mod_base = OTHER; note = cytidine-3'-phosphate
  modified_base 3: mod_base = OTHER; note = cytidine-3'-phosphate
  modified_base 4: mod_base = OTHER; note = uridine-3'-phosphate
  modified_base 5: mod_base = OTHER; note = guanosine-3'-phosphate
  modified_base 6: mod_base = OTHER; note = adenosine-3'-phosphate
  modified_base 7: mod_base = OTHER; note = guanosine-3'-phosphate
  modified_base 8: mod_base = OTHER; note = cytidine-3'-phosphate
  modified_base 9: mod_base = OTHER; note = cytidine-3'-phosphate
  modified_base 10: mod_base = OTHER; note = adenosine-3'-phosphate
  modified_base 11: mod_base = OTHER; note = cytidine-3'-phosphate
  modified_base 12: mod_base = OTHER; note = cytidine-3'-phosphate
  modified_base 13: mod_base = OTHER; note = uridine-3'-phosphate
  modified_base 14: mod_base = OTHER; note = uridine-3'-phosphate
  modified_base 15: mod_base = OTHER; note = uridine-3'-phosphate
  modified_base 16: mod_base = OTHER; note = adenosine-3'-phosphate
  modified_base 17: mod_base = OTHER; note = cytidine-3'-phosphate
  modified_base 18: mod_base = OTHER; note = uridine-3'-phosphate
  modified_base 19: mod_base = OTHER; note = cytidine-3'-phosphate
  misc_feature 1..19: note = RNA
  misc_feature 20..21: note = DNA
tcctgagccacctttactctt

SEQ ID NO: 996 - DNA, 21 bp, synthetic construct
  source 1..21: mol_type = other DNA
  modified_base 1: mod_base = OTHER; note = guanosine-3'-phosphate
  modified_base 2: mod_base = OTHER; note = adenosine-3'-phosphate
  modified_base 3: mod_base = OTHER; note = guanosine-3'-phosphate
  modified_base 4: mod_base = OTHER; note = uridine-3'-phosphate
  modified_base 5: mod_base = OTHER; note = adenosine-3'-phosphate
  modified_base 6: mod_base = OTHER; note = adenosine-3'-phosphate
  modified_base 7: mod_base = OTHER; note = adenosine-3'-phosphate
  modified_base 8: mod_base = OTHER; note = guanosine-3'-phosphate
  modified_base 9: mod_base = OTHER; note = guanosine-3'-phosphate
  modified_base 10: mod_base = OTHER; note = uridine-3'-phosphate
  modified_base 11: mod_base = OTHER; note = guanosine-3'-phosphate
  modified_base 12: mod_base = OTHER; note = guanosine-3'-phosphate
  modified_base 13: mod_base = OTHER; note = cytidine-3'-phosphate
  modified_base 14: mod_base = OTHER; note = uridine-3'-phosphate
  modified_base 15: mod_base = OTHER; note = cytidine-3'-phosphate
  modified_base 16: mod_base = OTHER; note = adenosine-3'-phosphate
  modified_base 17: mod_base = OTHER; note = guanosine-3'-phosphate
  modified_base 18: mod_base = OTHER; note = guanosine-3'-phosphate
  modified_base 19: mod_base = OTHER; note = adenosine-3'-phosphate
  misc_feature 1..19: note = RNA
  misc_feature 20..21: note = DNA
gagtaaaggtggctcaggatt

SEQ ID NO: 997 - DNA, 21 bp, synthetic construct
  source 1..21: mol_type = other DNA
  modified_base 1: mod_base = OTHER; note = cytidine-3'-phosphate
  modified_base 2: mod_base = OTHER; note = cytidine-3'-phosphate
  modified_base 3: mod_base = OTHER; note = uridine-3'-phosphate
  modified_base 4: mod_base = OTHER; note = guanosine-3'-phosphate
  modified_base 5: mod_base = OTHER; note = adenosine-3'-phosphate
  modified_base 6: mod_base = OTHER; note = guanosine-3'-phosphate
  modified_base 7: mod_base = OTHER; note = cytidine-3'-phosphate
  modified_base 8: mod_base = OTHER; note = cytidine-3'-phosphate
  modified_base 9: mod_base = OTHER; note = adenosine-3'-phosphate
  modified_base 10: mod_base = OTHER; note = cytidine-3'-phosphate
  modified_base 11: mod_base = OTHER; note = cytidine-3'-phosphate
  modified_base 12: mod_base = OTHER; note = uridine-3'-phosphate
  modified_base 13: mod_base = OTHER; note = uridine-3'-phosphate
  modified_base 14: mod_base = OTHER; note = uridine-3'-phosphate
  modified_base 15: mod_base = OTHER; note = adenosine-3'-phosphate
  modified_base 16: mod_base = OTHER; note = cytidine-3'-phosphate
  modified_base 17: mod_base = OTHER; note = uridine-3'-phosphate
  modified_base 18: mod_base = OTHER; note = cytidine-3'-phosphate
  modified_base 19: mod_base = OTHER; note = uridine-3'-phosphate
  misc_feature 1..19: note = RNA
  misc_feature 20..21: note = DNA
cctgagccacctttactcttt

SEQ ID NO: 998 - DNA, 21 bp, synthetic construct
  source 1..21: mol_type = other DNA
  modified_base 1: mod_base = OTHER; note = adenosine-3'-phosphate
  modified_base 2: mod_base = OTHER; note = guanosine-3'-phosphate
  modified_base 3: mod_base = OTHER; note = adenosine-3'-phosphate
  modified_base 4: mod_base = OTHER; note = guanosine-3'-phosphate
  modified_base 5: mod_base = OTHER; note = uridine-3'-phosphate
  modified_base 6: mod_base = OTHER; note = adenosine-3'-phosphate
  modified_base 7: mod_base = OTHER; note = adenosine-3'-phosphate
  modified_base 8: mod_base = OTHER; note = adenosine-3'-phosphate
  modified_base 9: mod_base = OTHER; note = guanosine-3'-phosphate
  modified_base 10: mod_base = OTHER; note = guanosine-3'-phosphate
  modified_base 11: mod_base = OTHER; note = uridine-3'-phosphate
  modified_base 12: mod_base = OTHER; note = guanosine-3'-phosphate
  modified_base 13: mod_base = OTHER; note = guanosine-3'-phosphate
  modified_base 14: mod_base = OTHER; note = cytidine-3'-phosphate
  modified_base 15: mod_base = OTHER; note = uridine-3'-phosphate
  modified_base 16: mod_base = OTHER; note = cytidine-3'-phosphate
  modified_base 17: mod_base = OTHER; note = adenosine-3'-phosphate
  modified_base 18: mod_base = OTHER; note = guanosine-3'-phosphate
  modified_base 19: mod_base = OTHER; note = guanosine-3'-phosphate
  misc_feature 1..19: note = RNA
  misc_feature 20..21: note = DNA
agagtaaaggtggctcaggtt

SEQ ID NO: 999 - DNA, 21 bp, synthetic construct
  source 1..21: mol_type = other DNA
  modified_base 1: mod_base = OTHER; note = uridine-3'-phosphate
  modified_base 2: mod_base = OTHER; note = guanosine-3'-phosphate
  modified_base 3: mod_base = OTHER; note = adenosine-3'-phosphate
  modified_base 4: mod_base = OTHER; note = guanosine-3'-phosphate
  modified_base 5: mod_base = OTHER; note = cytidine-3'-phosphate
  modified_base 6: mod_base = OTHER; note = cytidine-3'-phosphate
  modified_base 7: mod_base = OTHER; note = adenosine-3'-phosphate
  modified_base 8: mod_base = OTHER; note = cytidine-3'-phosphate
  modified_base 9: mod_base = OTHER; note = cytidine-3'-phosphate
  modified_base 10: mod_base = OTHER; note = uridine-3'-phosphate
  modified_base 11: mod_base = OTHER; note = uridine-3'-phosphate
  modified_base 12: mod_base = OTHER; note = uridine-3'-phosphate
  modified_base 13: mod_base = OTHER; note = adenosine-3'-phosphate
  modified_base 14: mod_base = OTHER; note = cytidine-3'-phosphate
  modified_base 15: mod_base = OTHER; note = uridine-3'-phosphate
  modified_base 16: mod_base = OTHER; note = cytidine-3'-phosphate
  modified_base 17: mod_base = OTHER; note = uridine-3'-phosphate
  modified_base 18: mod_base = OTHER; note = guanosine-3'-phosphate
  modified_base 19: mod_base = OTHER; note = cytidine-3'-phosphate
  misc_feature 1..19: note = RNA
  misc_feature 20..21: note = DNA
tgagccacctttactctgctt

SEQ ID NO: 1000 - DNA, 21 bp, synthetic construct
  source 1..21: mol_type = other DNA
  modified_base 1: mod_base = OTHER; note = guanosine-3'-phosphate
  modified_base 2: mod_base = OTHER; note = cytidine-3'-phosphate
  modified_base 3: mod_base = OTHER; note = adenosine-3'-phosphate
  modified_base 4: mod_base = OTHER; note = guanosine-3'-phosphate
  modified_base 5: mod_base = OTHER; note = adenosine-3'-phosphate
  modified_base 6: mod_base = OTHER; note = guanosine-3'-phosphate
  modified_base 7: mod_base = OTHER; note = uridine-3'-phosphate
  modified_base 8: mod_base = OTHER; note = adenosine-3'-phosphate
  modified_base 9: mod_base = OTHER; note = adenosine-3'-phosphate
  modified_base 10: mod_base = OTHER; note = adenosine-3'-phosphate
  modified_base 11: mod_base = OTHER; note = guanosine-3'-phosphate
  modified_base 12: mod_base = OTHER; note = guanosine-3'-phosphate
  modified_base 13: mod_base = OTHER; note = uridine-3'-phosphate
  modified_base 14: mod_base = OTHER; note = guanosine-3'-phosphate
  modified_base 15: mod_base = OTHER; note = guanosine-3'-phosphate
  modified_base 16: mod_base = OTHER; note = cytidine-3'-phosphate
  modified_base 17: mod_base = OTHER; note = uridine-3'-phosphate
  modified_base 18: mod_base = OTHER; note = cytidine-3'-phosphate
  modified_base 19: mod_base = OTHER; note = adenosine-3'-phosphate
  misc_feature 1..19: note = RNA
  misc_feature 20..21: note = DNA
gcagagtaaaggtggctcatt

SEQ ID NO: 1001 - DNA, 21 bp, synthetic construct
  source 1..21: mol_type = other DNA
  modified_base 1: mod_base = OTHER; note = adenosine-3'-phosphate
  modified_base 2: mod_base = OTHER; note = guanosine-3'-phosphate
  modified_base 3: mod_base = OTHER; note = cytidine-3'-phosphate
  modified_base 4: mod_base = OTHER; note = cytidine-3'-phosphate
  modified_base 5: mod_base = OTHER; note = adenosine-3'-phosphate
  modified_base 6: mod_base = OTHER; note = cytidine-3'-phosphate
  modified_base 7: mod_base = OTHER; note = cytidine-3'-phosphate
  modified_base 8: mod_base = OTHER; note = uridine-3'-phosphate
  modified_base 9: mod_base = OTHER; note = uridine-3'-phosphate
  modified_base 10: mod_base = OTHER; note = uridine-3'-phosphate
  modified_base 11: mod_base = OTHER; note = adenosine-3'-phosphate
  modified_base 12: mod_base = OTHER; note = cytidine-3'-phosphate
  modified_base 13: mod_base = OTHER; note = uridine-3'-phosphate
  modified_base 14: mod_base = OTHER; note = cytidine-3'-phosphate
  modified_base 15: mod_base = OTHER; note = uridine-3'-phosphate
  modified_base 16: mod_base = OTHER; note = guanosine-3'-phosphate
  modified_base 17: mod_base = OTHER; note = cytidine-3'-phosphate
  modified_base 18: mod_base = OTHER; note = uridine-3'-phosphate
  modified_base 19: mod_base = OTHER; note = cytidine-3'-phosphate
  misc_feature 1..19: note = RNA
  misc_feature 20..21: note = DNA
agccacctttactctgctctt

SEQ ID NO: 1002 - DNA, 21 bp, synthetic construct
  source 1..21: mol_type = other DNA
  modified_base 1: mod_base = OTHER; note = guanosine-3'-phosphate
  modified_base 2: mod_base = OTHER; note = adenosine-3'-phosphate
  modified_base 3: mod_base = OTHER; note = guanosine-3'-phosphate
  modified_base 4: mod_base = OTHER; note = cytidine-3'-phosphate
  modified_base 5: mod_base = OTHER; note = adenosine-3'-phosphate
  modified_base 6: mod_base = OTHER; note = guanosine-3'-phosphate
  modified_base 7: mod_base = OTHER; note = adenosine-3'-phosphate
  modified_base 8: mod_base = OTHER; note = guanosine-3'-phosphate
  modified_base 9: mod_base = OTHER; note = uridine-3'-phosphate
  modified_base 10: mod_base = OTHER; note = adenosine-3'-phosphate
  modified_base 11: mod_base = OTHER; note = adenosine-3'-phosphate
  modified_base 12: mod_base = OTHER; note = adenosine-3'-phosphate
  modified_base 13: mod_base = OTHER; note = guanosine-3'-phosphate
  modified_base 14: mod_base = OTHER; note = guanosine-3'-phosphate
  modified_base 15: mod_base = OTHER; note = uridine-3'-phosphate
  modified_base 16: mod_base = OTHER; note = guanosine-3'-phosphate
  modified_base 17: mod_base = OTHER; note = guanosine-3'-phosphate
  modified_base 18: mod_base = OTHER; note = cytidine-3'-phosphate
  modified_base 19: mod_base = OTHER; note = uridine-3'-phosphate
  misc_feature 1..19: note = RNA
  misc_feature 20..21: note = DNA
gagcagagtaaaggtggcttt

SEQ ID NO: 1003 - DNA, 21 bp, synthetic construct
  source 1..21: mol_type = other DNA
  modified_base 1: mod_base = OTHER; note = cytidine-3'-phosphate
  modified_base 2: mod_base = OTHER; note = adenosine-3'-phosphate
  modified_base 3: mod_base = OTHER; note = cytidine-3'-phosphate
  modified_base 4: mod_base = OTHER; note = cytidine-3'-phosphate
  modified_base 5: mod_base = OTHER; note = uridine-3'-phosphate
  modified_base 6: mod_base = OTHER; note = uridine-3'-phosphate
  modified_base 7: mod_base = OTHER; note = uridine-3'-phosphate
  modified_base 8: mod_base = OTHER; note = adenosine-3'-phosphate
  modified_base 9: mod_base = OTHER; note = cytidine-3'-phosphate
  modified_base 10: mod_base = OTHER; note = uridine-3'-phosphate
  modified_base 11: mod_base = OTHER; note = cytidine-3'-phosphate
  modified_base 12: mod_base = OTHER; note = uridine-3'-phosphate
  modified_base 13: mod_base = OTHER; note = guanosine-3'-phosphate
  modified_base 14: mod_base = OTHER; note = cytidine-3'-phosphate
  modified_base 15: mod_base = OTHER; note = uridine-3'-phosphate
  modified_base 16: mod_base = OTHER; note = cytidine-3'-phosphate
  modified_base 17: mod_base = OTHER; note = uridine-3'-phosphate
  modified_base 18: mod_base = OTHER; note = adenosine-3'-phosphate
  modified_base 19: mod_base = OTHER; note = uridine-3'-phosphate
  misc_feature 1..19: note = RNA
  misc_feature 20..21: note = DNA
cacctttactctgctctattt

SEQ ID NO: 1004 - DNA, 21 bp, synthetic construct
  source 1..21: mol_type = other DNA
  modified_base 1: mod_base = OTHER; note = adenosine-3'-phosphate
  modified_base 2: mod_base = OTHER; note = uridine-3'-phosphate
  modified_base 3: mod_base = OTHER; note = adenosine-3'-phosphate
  modified_base 4: mod_base = OTHER; note = guanosine-3'-phosphate
  modified_base 5: mod_base = OTHER; note = adenosine-3'-phosphate
  modified_base 6: mod_base = OTHER; note = guanosine-3'-phosphate
  modified_base 7: mod_base = OTHER; note = cytidine-3'-phosphate
  modified_base 8: mod_base = OTHER; note = adenosine-3'-phosphate
  modified_base 9: mod_base = OTHER; note = guanosine-3'-phosphate
  modified_base 10: mod_base = OTHER; note = adenosine-3'-phosphate
  modified_base 11: mod_base = OTHER; note = guanosine-3'-phosphate
  modified_base 12: mod_base = OTHER; note = uridine-3'-phosphate
  modified_base 13: mod_base = OTHER; note = adenosine-3'-phosphate
  modified_base 14: mod_base = OTHER; note = adenosine-3'-phosphate
  modified_base 15: mod_base = OTHER; note = adenosine-3'-phosphate
  modified_base 16: mod_base = OTHER; note = guanosine-3'-phosphate
  modified_base 17: mod_base = OTHER; note = guanosine-3'-phosphate
  modified_base 18: mod_base = OTHER; note = uridine-3'-phosphate
  modified_base 19: mod_base = OTHER; note = guanosine-3'-phosphate
  misc_feature 1..19: note = RNA
  misc_feature 20..21: note = DNA
atagagcagagtaaaggtgtt

SEQ ID NO: 1005 - DNA, 21 bp, synthetic construct
  source 1..21: mol_type = other DNA
  modified_base 1: mod_base = OTHER; note = uridine-3'-phosphate
  modified_base 2: mod_base = OTHER; note = adenosine-3'-phosphate
  modified_base 3: mod_base = OTHER; note = cytidine-3'-phosphate
  modified_base 4: mod_base = OTHER; note = uridine-3'-phosphate
  modified_base 5: mod_base = OTHER; note = cytidine-3'-phosphate
  modified_base 6: mod_base = OTHER; note = uridine-3'-phosphate
  modified_base 7: mod_base = OTHER; note = guanosine-3'-phosphate
  modified_base 8: mod_base = OTHER; note = cytidine-3'-phosphate
  modified_base 9: mod_base = OTHER; note = uridine-3'-phosphate
  modified_base 10: mod_base = OTHER; note = cytidine-3'-phosphate
  modified_base 11: mod_base = OTHER; note = uridine-3'-phosphate
  modified_base 12: mod_base = OTHER; note = adenosine-3'-phosphate
  modified_base 13: mod_base = OTHER; note = uridine-3'-phosphate
  modified_base 14: mod_base = OTHER; note = guanosine-3'-phosphate
  modified_base 15: mod_base = OTHER; note = cytidine-3'-phosphate
  modified_base 16: mod_base = OTHER; note = cytidine-3'-phosphate
  modified_base 17: mod_base = OTHER; note = adenosine-3'-phosphate
  modified_base 18: mod_base = OTHER; note = guanosine-3'-phosphate
  modified_base 19: mod_base = OTHER; note = guanosine-3'-phosphate
  modified_base 20: mod_base = OTHER; note = 2'-deoxythymidine-3'-phosphorothioate
  misc_feature 1..19: note = RNA
  misc_feature 20..21: note = DNA
tactctgctctatgccaggtt

SEQ ID NO: 1006 - DNA, 21 bp, synthetic construct
  source 1..21: mol_type = other DNA
  modified_base 1: mod_base = OTHER; note = cytidine-3'-phosphate
  modified_base 2: mod_base = OTHER; note = cytidine-3'-phosphate
  modified_base 3: mod_base = OTHER; note = uridine-3'-phosphate
  modified_base 4: mod_base = OTHER; note = guanosine-3'-phosphate
  modified_base 5: mod_base = OTHER; note = guanosine-3'-phosphate
  modified_base 6: mod_base = OTHER; note = cytidine-3'-phosphate
  modified_base 7: mod_base = OTHER; note = adenosine-3'-phosphate
  modified_base 8: mod_base = OTHER; note = uridine-3'-phosphate
  modified_base 9: mod_base = OTHER; note = adenosine-3'-phosphate
  modified_base 10: mod_base = OTHER; note = guanosine-3'-phosphate
  modified_base 11: mod_base = OTHER; note = adenosine-3'-phosphate
  modified_base 12: mod_base = OTHER; note = guanosine-3'-phosphate
  modified_base 13: mod_base = OTHER; note = cytidine-3'-phosphate
  modified_base 14: mod_base = OTHER; note = adenosine-3'-phosphate
  modified_base 15: mod_base = OTHER; note = guanosine-3'-phosphate
  modified_base 16: mod_base = OTHER; note = adenosine-3'-phosphate
  modified_base 17: mod_base = OTHER; note = guanosine-3'-phosphate
  modified_base 18: mod_base = OTHER; note = uridine-3'-phosphate
  modified_base 19: mod_base = OTHER; note = adenosine-3'-phosphate
  modified_base 20: mod_base = OTHER; note = 2'-deoxythymidine-3'-phosphorothioate
  misc_feature 1..19: note = RNA
  misc_feature 20..21: note = DNA
cctggcatagagcagagtatt

SEQ ID NO: 1007 - DNA, 21 bp, synthetic construct
  source 1..21: mol_type = other DNA
  modified_base 1: mod_base = OTHER; note = 2'-O-methyluridine-3'-phosphate
  modified_base 2: mod_base = OTHER; note = adenosine-3'-phosphate
  modified_base 3: mod_base = OTHER; note = 2'-O-methylcytidine-3'-phosphate
  modified_base 4: mod_base = OTHER; note = 2'-O-methyluridine-3'-phosphate
  modified_base 5: mod_base = OTHER; note = 2'-O-methylcytidine-3'-phosphate
  modified_base 6: mod_base = OTHER; note = 2'-O-methyluridine-3'-phosphate
  modified_base 7: mod_base = OTHER; note = guanosine-3'-phosphate
  modified_base 8: mod_base = OTHER; note = 2'-O-methylcytidine-3'-phosphate
  modified_base 9: mod_base = OTHER; note = 2'-O-methyluridine-3'-phosphate
  modified_base 10: mod_base = OTHER; note = 2'-O-methylcytidine-3'-phosphate
  modified_base 11: mod_base = OTHER; note = 2'-O-methyluridine-3'-phosphate
  modified_base 12: mod_base = OTHER; note = adenosine-3'-phosphate
  modified_base 13: mod_base = OTHER; note = 2'-O-methyluridine-3'-phosphate
  modified_base 14: mod_base = OTHER; note = guanosine-3'-phosphate
  modified_base 15: mod_base = OTHER; note = 2'-O-methylcytidine-3'-phosphate
  modified_base 16: mod_base = OTHER; note = 2'-O-methylcytidine-3'-phosphate
  modified_base 17: mod_base = OTHER; note = adenosine-3'-phosphate
  modified_base 18: mod_base = OTHER; note = guanosine-3'-phosphate
  modified_base 19: mod_base = OTHER; note = guanosine-3'-phosphate
  modified_base 20: mod_base = OTHER; note = 2'-deoxythymidine-3'-phosphorothioate
  misc_feature 1..19: note = RNA
  misc_feature 20..21: note = DNA
tactctgctctatgccaggtt

SEQ ID NO: 1008 - DNA, 21 bp, synthetic construct
  source 1..21: mol_type = other DNA
  modified_base 1: mod_base = OTHER; note = cytidine-3'-phosphate
  modified_base 2: mod_base = OTHER; note = cytidine-3'-phosphate
  modified_base 3: mod_base = OTHER; note = uridine-3'-phosphate
  modified_base 4: mod_base = OTHER; note = guanosine-3'-phosphate
  modified_base 5: mod_base = OTHER; note = guanosine-3'-phosphate
  modified_base 6: mod_base = OTHER; note = 2'-O-methylcytidine-3'-phosphate
  modified_base 7: mod_base = OTHER; note = adenosine-3'-phosphate
  modified_base 8: mod_base = OTHER; note = 2'-O-methyluridine-3'-phosphate
  modified_base 9: mod_base = OTHER; note = adenosine-3'-phosphate
  modified_base 10: mod_base = OTHER; note = guanosine-3'-phosphate
  modified_base 11: mod_base = OTHER; note = adenosine-3'-phosphate
  modified_base 12: mod_base = OTHER; note = guanosine-3'-phosphate
  modified_base 13: mod_base = OTHER; note = 2'-O-methylcytidine-3'-phosphate
  modified_base 14: mod_base = OTHER; note = adenosine-3'-phosphate
  modified_base 15: mod_base = OTHER; note = guanosine-3'-phosphate
  modified_base 16: mod_base = OTHER; note = adenosine-3'-phosphate
  modified_base 17: mod_base = OTHER; note = guanosine-3'-phosphate
  modified_base 18: mod_base = OTHER; note = 2'-O-methyluridine-3'-phosphate
  modified_base 19: mod_base = OTHER; note = adenosine-3'-phosphate
  modified_base 20: mod_base = OTHER; note = 2'-deoxythymidine-3'-phosphorothioate
  misc_feature 1..19: note = RNA
  misc_feature 20..21: note = DNA
cctggcatagagcagagtatt

SEQ ID NO: 1009 - DNA, 21 bp, synthetic construct
  source 1..21: mol_type = other DNA
  modified_base 1: mod_base = OTHER; note = adenosine-3'-phosphate
  modified_base 2: mod_base = OTHER; note = uridine-3'-phosphate
  modified_base 3: mod_base = OTHER; note = guanosine-3'-phosphate
  modified_base 4: mod_base = OTHER; note = cytidine-3'-phosphate
  modified_base 5: mod_base = OTHER; note = cytidine-3'-phosphate
  modified_base 6: mod_base = OTHER; note = adenosine-3'-phosphate
  modified_base 7: mod_base = OTHER; note = guanosine-3'-phosphate
  modified_base 8: mod_base = OTHER; note = guanosine-3'-phosphate
  modified_base 9: mod_base = OTHER; note = cytidine-3'-phosphate
  modified_base 10: mod_base = OTHER; note = uridine-3'-phosphate
  modified_base 11: mod_base = OTHER; note = guanosine-3'-phosphate
  modified_base 12: mod_base = OTHER; note = uridine-3'-phosphate
  modified_base 13: mod_base = OTHER; note = guanosine-3'-phosphate
  modified_base 14: mod_base = OTHER; note = cytidine-3'-phosphate
  modified_base 15: mod_base = OTHER; note = uridine-3'-phosphate
  modified_base 16: mod_base = OTHER; note = adenosine-3'-phosphate
  modified_base 17: mod_base = OTHER; note = guanosine-3'-phosphate
  modified_base 18: mod_base = OTHER; note = cytidine-3'-phosphate
  modified_base 19: mod_base = OTHER; note = adenosine-3'-phosphate
  misc_feature 1..19: note = RNA
  misc_feature 20..21: note = DNA
atgccaggctgtgctagcatt

SEQ ID NO: 1010 - DNA, 21 bp, synthetic construct
  source 1..21: mol_type = other DNA
  modified_base 1: mod_base = OTHER; note = uridine-3'-phosphate
  modified_base 2: mod_base = OTHER; note = guanosine-3'-phosphate
  modified_base 3: mod_base = OTHER; note = cytidine-3'-phosphate
  modified_base 4: mod_base = OTHER; note = uridine-3'-phosphate
  modified_base 5: mod_base = OTHER; note = adenosine-3'-phosphate
  modified_base 6: mod_base = OTHER; note = guanosine-3'-phosphate
  modified_base 7: mod_base = OTHER; note = cytidine-3'-phosphate
  modified_base 8: mod_base = OTHER; note = adenosine-3'-phosphate
  modified_base 9: mod_base = OTHER; note = cytidine-3'-phosphate
  modified_base 10: mod_base = OTHER; note = adenosine-3'-phosphate
  modified_base 11: mod_base = OTHER; note = guanosine-3'-phosphate
  modified_base 12: mod_base = OTHER; note = cytidine-3'-phosphate
  modified_base 13: mod_base = OTHER; note = cytidine-3'-phosphate
  modified_base 14: mod_base = OTHER; note = uridine-3'-phosphate
  modified_base 15: mod_base = OTHER; note = guanosine-3'-phosphate
  modified_base 16: mod_base = OTHER; note = guanosine-3'-phosphate
  modified_base 17: mod_base = OTHER; note = cytidine-3'-phosphate
  modified_base 18: mod_base = OTHER; note = adenosine-3'-phosphate
  modified_base 19: mod_base = OTHER; note = uridine-3'-phosphate
  misc_feature 1..19: note = RNA
  misc_feature 20..21: note = DNA
tgctagcacagcctggcattt

SEQ ID NO: 1011 - DNA, 21 bp, synthetic construct
  source 1..21: mol_type = other DNA
  modified_base 1: mod_base = OTHER; note = adenosine-3'-phosphate
  modified_base 2: mod_base = OTHER; note = guanosine-3'-phosphate
  modified_base 3: mod_base = OTHER; note = guanosine-3'-phosphate
  modified_base 4: mod_base = OTHER; note = cytidine-3'-phosphate
  modified_base 5: mod_base = OTHER; note = uridine-3'-phosphate
  modified_base 6: mod_base = OTHER; note = guanosine-3'-phosphate
  modified_base 7: mod_base = OTHER; note = uridine-3'-phosphate
  modified_base 8: mod_base = OTHER; note = guanosine-3'-phosphate
  modified_base 9: mod_base = OTHER; note = cytidine-3'-phosphate
  modified_base 10: mod_base = OTHER; note = uridine-3'-phosphate
  modified_base 11: mod_base = OTHER; note = adenosine-3'-phosphate
  modified_base 12: mod_base = OTHER; note = guanosine-3'-phosphate
  modified_base 13: mod_base = OTHER; note = cytidine-3'-phosphate
  modified_base 14: mod_base = OTHER; note = adenosine-3'-phosphate
  modified_base 15: mod_base = OTHER; note = adenosine-3'-phosphate
  modified_base 16: mod_base = OTHER; note = cytidine-3'-phosphate
  modified_base 17: mod_base = OTHER; note = adenosine-3'-phosphate
  modified_base 18: mod_base = OTHER; note = cytidine-3'-phosphate
  modified_base 19: mod_base = OTHER; note = cytidine-3'-phosphate
  misc_feature 1..19: note = RNA
  misc_feature 20..21: note = DNA
aggctgtgctagcaacacctt

SEQ ID NO: 1012 - DNA, 21 bp, synthetic construct
  source 1..21: mol_type = other DNA
  modified_base 1: mod_base = OTHER; note = guanosine-3'-phosphate
  modified_base 2: mod_base = OTHER; note = guanosine-3'-phosphate
  modified_base 3: mod_base = OTHER; note = uridine-3'-phosphate
  modified_base 4: mod_base = OTHER; note = guanosine-3'-phosphate
  modified_base 5: mod_base = OTHER; note = uridine-3'-phosphate
  modified_base 6: mod_base = OTHER; note = uridine-3'-phosphate
  modified_base 7: mod_base = OTHER; note = guanosine-3'-phosphate
  modified_base 8: mod_base = OTHER; note = cytidine-3'-phosphate
  modified_base 9: mod_base = OTHER; note = uridine-3'-phosphate
  modified_base 10: mod_base = OTHER; note = adenosine-3'-phosphate
  modified_base 11: mod_base = OTHER; note = guanosine-3'-phosphate
  modified_base 12: mod_base = OTHER; note = cytidine-3'-phosphate
  modified_base 13: mod_base = OTHER; note = adenosine-3'-phosphate
  modified_base 14: mod_base = OTHER; note = cytidine-3'-phosphate
  modified_base 15: mod_base = OTHER; note = adenosine-3'-phosphate
  modified_base 16: mod_base = OTHER; note = guanosine-3'-phosphate
  modified_base 17: mod_base = OTHER; note = cytidine-3'-phosphate
  modified_base 18: mod_base = OTHER; note = cytidine-3'-phosphate
  modified_base 19: mod_base = OTHER; note = uridine-3'-phosphate
  misc_feature 1..19: note = RNA
  misc_feature 20..21: note = DNA
ggtgttgctagcacagccttt

SEQ ID NO: 1013 - DNA, 21 bp, synthetic construct
  source 1..21: mol_type = other DNA
  modified_base 1: mod_base = OTHER; note = cytidine-3'-phosphate
  modified_base 2: mod_base = OTHER; note = uridine-3'-phosphate
  modified_base 3: mod_base = OTHER; note = guanosine-3'-phosphate
  modified_base 4: mod_base = OTHER; note = uridine-3'-phosphate
  modified_base 5: mod_base = OTHER; note = guanosine-3'-phosphate
  modified_base 6: mod_base = OTHER; note = cytidine-3'-phosphate
  modified_base 7: mod_base = OTHER; note = uridine-3'-phosphate
  modified_base 8: mod_base = OTHER; note = adenosine-3'-phosphate
  modified_base 9: mod_base = OTHER; note = guanosine-3'-phosphate
  modified_base 10: mod_base = OTHER; note = cytidine-3'-phosphate
  modified_base 11: mod_base = OTHER; note = adenosine-3'-phosphate
  modified_base 12: mod_base = OTHER; note = adenosine-3'-phosphate
  modified_base 13: mod_base = OTHER; note = cytidine-3'-phosphate
  modified_base 14: mod_base = OTHER; note = adenosine-3'-phosphate
  modified_base 15: mod_base = OTHER; note = cytidine-3'-phosphate
  modified_base 16: mod_base = OTHER; note = cytidine-3'-phosphate
  modified_base 17: mod_base = OTHER; note = cytidine-3'-phosphate
  modified_base 18: mod_base = OTHER; note = adenosine-3'-phosphate
  modified_base 19: mod_base = OTHER; note = adenosine-3'-phosphate
  misc_feature 1..19: note = RNA
  misc_feature 20..21: note = DNA
ctgtgctagcaacacccaatt

SEQ ID NO: 1014 - DNA, 21 bp, synthetic construct
  source 1..21: mol_type = other DNA
  modified_base 1: mod_base = OTHER; note = uridine-3'-phosphate
  modified_base 2: mod_base = OTHER; note = uridine-3'-phosphate
  modified_base 3: mod_base = OTHER; note = guanosine-3'-phosphate
  modified_base 4: mod_base = OTHER; note = guanosine-3'-phosphate
  modified_base 5: mod_base = OTHER; note = guanosine-3'-phosphate
  modified_base 6: mod_base = OTHER; note = uridine-3'-phosphate
  modified_base 7: mod_base = OTHER; note = guanosine-3'-phosphate
  modified_base 8: mod_base = OTHER; note = uridine-3'-phosphate
  modified_base 9: mod_base = OTHER; note = uridine-3'-phosphate
  modified_base 10: mod_base = OTHER; note = guanosine-3'-phosphate
  modified_base 11: mod_base = OTHER; note = cytidine-3'-phosphate
  modified_base 12: mod_base = OTHER; note = uridine-3'-phosphate
  modified_base 13: mod_base = OTHER; note = adenosine-3'-phosphate
  modified_base 14: mod_base = OTHER; note = guanosine-3'-phosphate
  modified_base 15: mod_base = OTHER; note = cytidine-3'-phosphate
  modified_base 16: mod_base = OTHER; note = adenosine-3'-phosphate
  modified_base 17: mod_base = OTHER; note = cytidine-3'-phosphate
  modified_base 18: mod_base = OTHER; note = adenosine-3'-phosphate
  modified_base 19: mod_base = OTHER; note = guanosine-3'-phosphate
  misc_feature 1..19: note = RNA
  misc_feature 20..21: note = DNA
ttgggtgttgctagcacagtt

SEQ ID NO: 1015 - DNA, 21 bp, synthetic construct
  source 1..21: mol_type = other DNA
  modified_base 1: mod_base = OTHER; note = guanosine-3'-phosphate
  modified_base 2: mod_base = OTHER; note = cytidine-3'-phosphate
  modified_base 3: mod_base = OTHER; note = uridine-3'-phosphate
  modified_base 4: mod_base = OTHER; note = adenosine-3'-phosphate
  modified_base 5: mod_base = OTHER; note = guanosine-3'-phosphate
  modified_base 6: mod_base = OTHER; note = cytidine-3'-phosphate
  modified_base 7: mod_base = OTHER; note = adenosine-3'-phosphate
  modified_base 8: mod_base = OTHER; note = adenosine-3'-phosphate
  modified_base 9: mod_base = OTHER; note = cytidine-3'-phosphate
  modified_base 10: mod_base = OTHER; note = adenosine-3'-phosphate
  modified_base 11: mod_base = OTHER; note = cytidine-3'-phosphate
  modified_base 12: mod_base = OTHER; note = cytidine-3'-phosphate
  modified_base 13: mod_base = OTHER; note = cytidine-3'-phosphate
  modified_base 14: mod_base = OTHER; note = adenosine-3'-phosphate
  modified_base 15: mod_base = OTHER; note = adenosine-3'-phosphate
  modified_base 16: mod_base = OTHER; note = adenosine-3'-phosphate
  modified_base 17: mod_base = OTHER; note = guanosine-3'-phosphate
  modified_base 18: mod_base = OTHER; note = guanosine-3'-phosphate
  modified_base 19: mod_base = OTHER; note = uridine-3'-phosphate
  misc_feature 1..19: note = RNA
  misc_feature 20..21: note = DNA
gctagcaacacccaaaggttt

SEQ ID NO: 1016 - DNA, 21 bp, synthetic construct
  source 1..21: mol_type = other DNA
  modified_base 1: mod_base = OTHER; note = adenosine-3'-phosphate
  modified_base 2: mod_base = OTHER; note = cytidine-3'-phosphate
  modified_base 3: mod_base = OTHER; note = cytidine-3'-phosphate
  modified_base 4: mod_base = OTHER; note = uridine-3'-phosphate
  modified_base 5: mod_base = OTHER; note = uridine-3'-phosphate
  modified_base 6: mod_base = OTHER; note = uridine-3'-phosphate
  modified_base 7: mod_base = OTHER; note = guanosine-3'-phosphate
  modified_base 8: mod_base = OTHER; note = guanosine-3'-phosphate
  modified_base 9: mod_base = OTHER; note = guanosine-3'-phosphate
  modified_base 10: mod_base = OTHER; note = uridine-3'-phosphate
  modified_base 11: mod_base = OTHER; note = guanosine-3'-phosphate
  modified_base 12: mod_base = OTHER; note = uridine-3'-phosphate
  modified_base 13: mod_base = OTHER; note = uridine-3'-phosphate
  modified_base 14: mod_base = OTHER; note = guanosine-3'-phosphate
  modified_base 15: mod_base = OTHER; note = cytidine-3'-phosphate
  modified_base 16: mod_base = OTHER; note = uridine-3'-phosphate
  modified_base 17: mod_base = OTHER; note = adenosine-3'-phosphate
  modified_base 18: mod_base = OTHER; note = guanosine-3'-phosphate
  modified_base 19: mod_base = OTHER; note = cytidine-3'-phosphate
  misc_feature 1..19: note = RNA
  misc_feature 20..21: note = DNA
acctttgggtgttgctagctt

SEQ ID NO: 1017 - DNA, 21 bp, synthetic construct
  source 1..21: mol_type = other DNA
  modified_base 1: mod_base = OTHER; note = guanosine-3'-phosphate
  modified_base 2: mod_base = OTHER; note = guanosine-3'-phosphate
  modified_base 3: mod_base = OTHER; note = adenosine-3'-phosphate
  modified_base 4: mod_base = OTHER; note = guanosine-3'-phosphate
  modified_base 5: mod_base = OTHER; note = cytidine-3'-phosphate
  modified_base 6: mod_base = OTHER; note = cytidine-3'-phosphate
  modified_base 7: mod_base = OTHER; note = adenosine-3'-phosphate
  modified_base 8: mod_base = OTHER; note = uridine-3'-phosphate
  modified_base 9: mod_base = OTHER; note = cytidine-3'-phosphate
  modified_base 10: mod_base = OTHER; note = adenosine-3'-phosphate
  modified_base 11: mod_base = OTHER; note = cytidine-3'-phosphate
  modified_base 12: mod_base = OTHER; note = cytidine-3'-phosphate
  modified_base 13: mod_base = OTHER; note = uridine-3'-phosphate
  modified_base 14: mod_base = OTHER; note = adenosine-3'-phosphate
  modified_base 15: mod_base = OTHER; note = guanosine-3'-phosphate
  modified_base 16: mod_base = OTHER; note = guanosine-3'-phosphate
  modified_base 17: mod_base = OTHER; note = adenosine-3'-phosphate
  modified_base 18: mod_base = OTHER; note = cytidine-3'-phosphate
  modified_base 19: mod_base = OTHER; note = uridine-3'-phosphate
  misc_feature 1..19: note = RNA
  misc_feature 20..21: note = DNA
ggagccatcacctaggacttt

SEQ ID NO: 1018 - DNA, 21 bp, synthetic construct
  source 1..21: mol_type = other DNA
  modified_base 1: mod_base = OTHER; note = adenosine-3'-phosphate
  modified_base 2: mod_base = OTHER; note = guanosine-3'-phosphate
  modified_base 3: mod_base = OTHER; note = uridine-3'-phosphate
  modified_base 4: mod_base = OTHER; note = cytidine-3'-phosphate
  modified_base 5: mod_base = OTHER; note = cytidine-3'-phosphate
  modified_base 6: mod_base = OTHER; note = uridine-3'-phosphate
  modified_base 7: mod_base = OTHER; note = adenosine-3'-phosphate
  modified_base 8: mod_base = OTHER; note = guanosine-3'-phosphate
  modified_base 9: mod_base = OTHER; note = guanosine-3'-phosphate
  modified_base 10: mod_base = OTHER; note = uridine-3'-phosphate
  modified_base 11: mod_base = OTHER; note = guanosine-3'-phosphate
  modified_base 12: mod_base = OTHER; note = adenosine-3'-phosphate
  modified_base 13: mod_base = OTHER; note = uridine-3'-phosphate
  modified_base 14: mod_base = OTHER; note = guanosine-3'-phosphate
  modified_base 15: mod_base = OTHER; note = guanosine-3'-phosphate
  modified_base 16: mod_base = OTHER; note = cytidine-3'-phosphate
  modified_base 17: mod_base = OTHER; note = uridine-3'-phosphate
  modified_base 18: mod_base = OTHER; note = cytidine-3'-phosphate
  modified_base 19: mod_base = OTHER; note = cytidine-3'-phosphate
  misc_feature 1..19: note = RNA
  misc_feature 20..21: note = DNA
agtcctaggtgatggctcctt

SEQ ID NO: 1019 - DNA, 21 bp, synthetic construct
  source 1..21: mol_type = other DNA
  modified_base 1: mod_base = OTHER; note = cytidine-3'-phosphate
  modified_base 2: mod_base = OTHER; note = adenosine-3'-phosphate
  modified_base 3: mod_base = OTHER; note = cytidine-3'-phosphate
  modified_base 4: mod_base = OTHER; note = cytidine-3'-phosphate
  modified_base 5: mod_base = OTHER; note = uridine-3'-phosphate
  modified_base 6: mod_base = OTHER; note = adenosine-3'-phosphate
  modified_base 7: mod_base = OTHER; note = guanosine-3'-phosphate
  modified_base 8: mod_base = OTHER; note = guanosine-3'-phosphate
  modified_base 9: mod_base = OTHER; note = adenosine-3'-phosphate
  modified_base 10: mod_base = OTHER; note = cytidine-3'-phosphate
  modified_base 11: mod_base = OTHER; note = uridine-3'-phosphate
  modified_base 12: mod_base = OTHER; note = guanosine-3'-phosphate
  modified_base 13: mod_base = OTHER; note = adenosine-3'-phosphate
  modified_base 14: mod_base = OTHER; note = cytidine-3'-phosphate
  modified_base 15: mod_base = OTHER; note = uridine-3'-phosphate
  modified_base 16: mod_base = OTHER; note = cytidine-3'-phosphate
  modified_base 17: mod_base = OTHER; note = guanosine-3'-phosphate
  modified_base 18: mod_base = OTHER; note = guanosine-3'-phosphate
  modified_base 19: mod_base = OTHER; note = cytidine-3'-phosphate
  misc_feature 1..19: note = RNA
  misc_feature 20..21: note = DNA
cacctaggactgactcggctt

SEQ ID NO: 1020 - DNA, 21 bp, synthetic construct
  source 1..21: mol_type = other DNA
  modified_base 1: mod_base = OTHER; note = guanosine-3'-phosphate
  modified_base 2: mod_base = OTHER; note = cytidine-3'-phosphate
  modified_base 3: mod_base = OTHER; note = cytidine-3'-phosphate
  modified_base 4: mod_base = OTHER; note = guanosine-3'-phosphate
  modified_base 5: mod_base = OTHER; note = adenosine-3'-phosphate
  modified_base 6: mod_base = OTHER; note = guanosine-3'-phosphate
  modified_base 7: mod_base = OTHER; note = uridine-3'-phosphate
  modified_base 8: mod_base = OTHER; note = cytidine-3'-phosphate
  modified_base 9: mod_base = OTHER; note = adenosine-3'-phosphate
  modified_base 10: mod_base = OTHER; note = guanosine-3'-phosphate
  modified_base 11: mod_base = OTHER; note = uridine-3'-phosphate
  modified_base 12: mod_base = OTHER; note = cytidine-3'-phosphate
  modified_base 13: mod_base = OTHER; note = cytidine-3'-phosphate
  modified_base 14: mod_base = OTHER; note = uridine-3'-phosphate
  modified_base 15: mod_base = OTHER; note = adenosine-3'-phosphate
  modified_base 16: mod_base = OTHER; note = guanosine-3'-phosphate
  modified_base 17: mod_base = OTHER; note = guanosine-3'-phosphate
  modified_base 18: mod_base = OTHER; note = uridine-3'-phosphate
  modified_base 19: mod_base = OTHER; note = guanosine-3'-phosphate
  misc_feature 1..19: note = RNA
  misc_feature 20..21: note = DNA
gccgagtcagtcctaggtgtt

SEQ ID NO: 1021 - DNA, 21 bp, synthetic construct
  source 1..21: mol_type = other DNA
  modified_base 1: mod_base = OTHER; note = adenosine-3'-phosphate
  modified_base 2: mod_base = OTHER; note = guanosine-3'-phosphate
  modified_base 3: mod_base = OTHER; note = guanosine-3'-phosphate
  modified_base 4: mod_base = OTHER; note = adenosine-3'-phosphate
  modified_base 5: mod_base = OTHER; note = cytidine-3'-phosphate
  modified_base 6: mod_base = OTHER; note = uridine-3'-phosphate
  modified_base 7: mod_base = OTHER; note = guanosine-3'-phosphate
  modified_base 8: mod_base = OTHER; note = adenosine-3'-phosphate
  modified_base 9: mod_base = OTHER; note = cytidine-3'-phosphate
  modified_base 10: mod_base = OTHER; note = uridine-3'-phosphate
  modified_base 11: mod_base = OTHER; note = cytidine-3'-phosphate
  modified_base 12: mod_base = OTHER; note = guanosine-3'-phosphate
  modified_base 13: mod_base = OTHER; note = guanosine-3'-phosphate
  modified_base 14: mod_base = OTHER; note = cytidine-3'-phosphate
  modified_base 15: mod_base = OTHER; note = adenosine-3'-phosphate
  modified_base 16: mod_base = OTHER; note = guanosine-3'-phosphate
  modified_base 17: mod_base = OTHER; note = uridine-3'-phosphate
  modified_base 18: mod_base = OTHER; note = guanosine-3'-phosphate
  modified_base 19: mod_base = OTHER; note = uridine-3'-phosphate
  misc_feature 1..19: note = RNA
  misc_feature 20..21: note = DNA
aggactgactcggcagtgttt

SEQ ID NO: 1022 - DNA, 21 bp, synthetic construct
  source 1..21: mol_type = other DNA
  modified_base 1: mod_base = OTHER; note = adenosine-3'-phosphate
  modified_base 2: mod_base = OTHER; note = cytidine-3'-phosphate
  modified_base 3: mod_base = OTHER; note = adenosine-3'-phosphate
  modified_base 4: mod_base = OTHER; note = cytidine-3'-phosphate
  modified_base 5: mod_base = OTHER; note = uridine-3'-phosphate
  modified_base 6: mod_base = OTHER; note = guanosine-3'-phosphate
  modified_base 7: mod_base = OTHER; note = cytidine-3'-phosphate
  modified_base 8: mod_base = OTHER; note = cytidine-3'-phosphate
  modified_base 9: mod_base = OTHER; note = guanosine-3'-phosphate
  modified_base 10: mod_base = OTHER; note = adenosine-3'-phosphate
  modified_base 11: mod_base = OTHER; note = guanosine-3'-phosphate
  modified_base 12: mod_base = OTHER; note = uridine-3'-phosphate
  modified_base 13: mod_base = OTHER; note = cytidine-3'-phosphate
  modified_base 14: mod_base = OTHER; note = adenosine-3'-phosphate
  modified_base 15: mod_base = OTHER; note = guanosine-3'-phosphate
  modified_base 16: mod_base = OTHER; note = uridine-3'-phosphate
  modified_base 17: mod_base = OTHER; note = cytidine-3'-phosphate
  modified_base 18: mod_base = OTHER; note = cytidine-3'-phosphate
  modified_base 19: mod_base = OTHER; note = uridine-3'-phosphate
  misc_feature 1..19: note = RNA
  misc_feature 20..21: note = DNA
acactgccgagtcagtccttt

SEQ ID NO: 1023 - DNA, 21 bp, synthetic construct
  source 1..21: mol_type = other DNA
  modified_base 1: mod_base = OTHER; note = guanosine-3'-phosphate
  modified_base 2: mod_base = OTHER; note = guanosine-3'-phosphate
  modified_base 3: mod_base = OTHER; note = adenosine-3'-phosphate
  modified_base 4: mod_base = OTHER; note = cytidine-3'-phosphate
  modified_base 5: mod_base = OTHER; note = uridine-3'-phosphate
  modified_base 6: mod_base = OTHER; note = guanosine-3'-phosphate
  modified_base 7: mod_base = OTHER; note = adenosine-3'-phosphate
  modified_base 8: mod_base = OTHER; note = cytidine-3'-phosphate
  modified_base 9: mod_base = OTHER; note = uridine-3'-phosphate
  modified_base 10: mod_base = OTHER; note = cytidine-3'-phosphate
  modified_base 11: mod_base = OTHER; note = guanosine-3'-phosphate
  modified_base 12: mod_base = OTHER; note = guanosine-3'-phosphate
  modified_base 13: mod_base = OTHER; note = cytidine-3'-phosphate
  modified_base 14: mod_base = OTHER; note = adenosine-3'-phosphate
  modified_base 15: mod_base = OTHER; note = guanosine-3'-phosphate
  modified_base 16: mod_base = OTHER; note = uridine-3'-phosphate
  modified_base 17: mod_base = OTHER; note = guanosine-3'-phosphate
  modified_base 18: mod_base = OTHER; note = uridine-3'-phosphate
  modified_base 19: mod_base = OTHER; note = guanosine-3'-phosphate
  misc_feature 1..19: note = RNA
  misc_feature 20..21: note = DNA
ggactgactcggcagtgtgtt

SEQ ID NO: 1024 - DNA, 21 bp, synthetic construct
  source 1..21: mol_type = other DNA
  modified_base 1: mod_base = OTHER; note = cytidine-3'-phosphate
  modified_base 2: mod_base = OTHER; note = adenosine-3'-phosphate
  modified_base 3: mod_base = OTHER; note = cytidine-3'-phosphate
  modified_base 4: mod_base = OTHER; note = adenosine-3'-phosphate
  modified_base 5: mod_base = OTHER; note = cytidine-3'-phosphate
  modified_base 6: mod_base = OTHER; note = uridine-3'-phosphate
  modified_base 7: mod_base = OTHER; note = guanosine-3'-phosphate
  modified_base 8: mod_base = OTHER; note = cytidine-3'-phosphate
  modified_base 9: mod_base = OTHER; note = cytidine-3'-phosphate
  modified_base 10: mod_base = OTHER; note = guanosine-3'-phosphate
  modified_base 11: mod_base = OTHER; note = adenosine-3'-phosphate
  modified_base 12: mod_base = OTHER; note = guanosine-3'-phosphate
  modified_base 13: mod_base = OTHER; note = uridine-3'-phosphate
  modified_base 14: mod_base = OTHER; note = cytidine-3'-phosphate
  modified_base 15: mod_base = OTHER; note = adenosine-3'-phosphate
  modified_base 16: mod_base = OTHER; note = guanosine-3'-phosphate
  modified_base 17: mod_base = OTHER; note = uridine-3'-phosphate
  modified_base 18: mod_base = OTHER; note = cytidine-3'-phosphate
  modified_base 19: mod_base = OTHER; note = cytidine-3'-phosphate
  misc_feature 1..19: note = RNA
  misc_feature 20..21: note = DNA
cacactgccgagtcagtcctt

SEQ ID NO: 1025 - DNA, 21 bp, synthetic construct
  source 1..21: mol_type = other DNA
  modified_base 1: mod_base = OTHER; note = uridine-3'-phosphate
  modified_base 2: mod_base = OTHER; note = guanosine-3'-phosphate
  modified_base 3: mod_base = OTHER; note = guanosine-3'-phosphate
  modified_base 4: mod_base = OTHER; note = uridine-3'-phosphate
  modified_base 5: mod_base = OTHER; note = guanosine-3'-phosphate
  modified_base 6: mod_base = OTHER; note = cytidine-3'-phosphate
  modified_base 7: mod_base = OTHER; note = adenosine-3'-phosphate
  modified_base 8: mod_base = OTHER; note = uridine-3'-phosphate
  modified_base 9: mod_base = OTHER; note = guanosine-3'-phosphate
  modified_base 10: mod_base = OTHER; note = cytidine-3'-phosphate
  modified_base 11: mod_base = OTHER; note = adenosine-3'-phosphate
  modified_base 12: mod_base = OTHER; note = cytidine-3'-phosphate
  modified_base 13: mod_base = OTHER; note = uridine-3'-phosphate
  modified_base 14: mod_base = OTHER; note = guanosine-3'-phosphate
  modified_base 15: mod_base = OTHER; note = uridine-3'-phosphate
  modified_base 16: mod_base = OTHER; note = cytidine-3'-phosphate
  modified_base 17: mod_base = OTHER; note = uridine-3'-phosphate
  modified_base 18: mod_base = OTHER; note = cytidine-3'-phosphate
  modified_base 19: mod_base = OTHER; note = adenosine-3'-phosphate
  misc_feature 1..19: note = RNA
  misc_feature 20..21: note = DNA
tggtgcatgcactgtctcatt

SEQ ID NO: 1026 - DNA, 21 bp, synthetic construct
  source 1..21: mol_type = other DNA
  modified_base 1: mod_base = OTHER; note = uridine-3'-phosphate
  modified_base 2: mod_base = OTHER; note = guanosine-3'-phosphate
  modified_base 3: mod_base = OTHER; note = adenosine-3'-phosphate
  modified_base 4: mod_base = OTHER; note = guanosine-3'-phosphate
  modified_base 5: mod_base = OTHER; note = adenosine-3'-phosphate
  modified_base 6: mod_base = OTHER; note = cytidine-3'-phosphate
  modified_base 7: mod_base = OTHER; note = adenosine-3'-phosphate
  modified_base 8: mod_base = OTHER; note = guanosine-3'-phosphate
  modified_base 9: mod_base = OTHER; note = uridine-3'-phosphate
  modified_base 10: mod_base = OTHER; note = guanosine-3'-phosphate
  modified_base 11: mod_base = OTHER; note = cytidine-3'-phosphate
  modified_base 12: mod_base = OTHER; note = adenosine-3'-phosphate
  modified_base 13: mod_base = OTHER; note = uridine-3'-phosphate
  modified_base 14: mod_base = OTHER; note = guanosine-3'-phosphate
  modified_base 15: mod_base = OTHER; note = cytidine-3'-phosphate
  modified_base 16: mod_base = OTHER; note = adenosine-3'-phosphate
  modified_base 17: mod_base = OTHER; note = cytidine-3'-phosphate
  modified_base 18: mod_base = OTHER; note = cytidine-3'-phosphate
  modified_base 19: mod_base = OTHER; note = adenosine-3'-phosphate
  misc_feature 1..19: note = RNA
  misc_feature 20..21: note = DNA
tgagacagtgcatgcaccatt

SEQ ID NO: 1027 - DNA, 21 bp, synthetic construct
  source 1..21: mol_type = other DNA
  modified_base 1: mod_base = OTHER; note = adenosine-3'-phosphate
  modified_base 2: mod_base = OTHER; note = uridine-3'-phosphate
  modified_base 3: mod_base = OTHER; note = guanosine-3'-phosphate
  modified_base 4: mod_base = OTHER; note = cytidine-3'-phosphate
  modified_base 5: mod_base = OTHER; note = adenosine-3'-phosphate
  modified_base 6: mod_base = OTHER; note = cytidine-3'-phosphate
  modified_base 7: mod_base = OTHER; note = uridine-3'-phosphate
  modified_base 8: mod_base = OTHER; note = guanosine-3'-phosphate
  modified_base 9: mod_base = OTHER; note = uridine-3'-phosphate
  modified_base 10: mod_base = OTHER; note = cytidine-3'-phosphate
  modified_base 11: mod_base = OTHER; note = uridine-3'-phosphate
  modified_base 12: mod_base = OTHER; note = cytidine-3'-phosphate
  modified_base 13: mod_base = OTHER; note = adenosine-3'-phosphate
  modified_base 14: mod_base = OTHER; note = guanosine-3'-phosphate
  modified_base 15: mod_base = OTHER; note = cytidine-3'-phosphate
  modified_base 16: mod_base = OTHER; note = cytidine-3'-phosphate
  modified_base 17: mod_base = OTHER; note = adenosine-3'-phosphate
  modified_base 18: mod_base = OTHER; note = adenosine-3'-phosphate
  modified_base 19: mod_base = OTHER; note = cytidine-3'-phosphate
  misc_feature 1..19: note = RNA
  misc_feature 20..21: note = DNA
atgcactgtctcagccaactt

SEQ ID NO: 1028 - DNA, 21 bp, synthetic construct
  source 1..21: mol_type = other DNA
  modified_base 1: mod_base = OTHER; note = guanosine-3'-phosphate
  modified_base 2: mod_base = OTHER; note = uridine-3'-phosphate
  modified_base 3: mod_base = OTHER; note = uridine-3'-phosphate
  modified_base 4: mod_base = OTHER; note = guanosine-3'-phosphate
  modified_base 5: mod_base = OTHER; note = guanosine-3'-phosphate
  modified_base 6: mod_base = OTHER; note = cytidine-3'-phosphate
  modified_base 7: mod_base = OTHER; note = uridine-3'-phosphate
  modified_base 8: mod_base = OTHER; note = guanosine-3'-phosphate
  modified_base 9: mod_base = OTHER; note = adenosine-3'-phosphate
  modified_base 10: mod_base = OTHER; note = guanosine-3'-phosphate
  modified_base 11: mod_base = OTHER; note = adenosine-3'-phosphate
  modified_base 12: mod_base = OTHER; note = cytidine-3'-phosphate
  modified_base 13: mod_base = OTHER; note = adenosine-3'-phosphate
  modified_base 14: mod_base = OTHER; note = guanosine-3'-phosphate
  modified_base 15: mod_base = OTHER; note = uridine-3'-phosphate
  modified_base 16: mod_base = OTHER; note = guanosine-3'-phosphate
  modified_base 17: mod_base = OTHER; note = cytidine-3'-phosphate
  modified_base 18: mod_base = OTHER; note = adenosine-3'-phosphate
  modified_base 19: mod_base = OTHER; note = uridine-3'-phosphate
  misc_feature 1..19: note = RNA
  misc_feature 20..21: note = DNA
gttggctgagacagtgcattt

SEQ ID NO: 1029 - DNA, 21 bp, synthetic construct
  source 1..21: mol_type = other DNA
  modified_base 1: mod_base = OTHER; note = cytidine-3'-phosphate
  modified_base 2: mod_base = OTHER; note = uridine-3'-phosphate
  modified_base 3: mod_base = OTHER; note = guanosine-3'-phosphate
  modified_base 4: mod_base = OTHER; note = uridine-3'-phosphate
  modified_base 5: mod_base = OTHER; note = cytidine-3'-phosphate
  modified_base 6: mod_base = OTHER; note = uridine-3'-phosphate
  modified_base 7: mod_base = OTHER; note = cytidine-3'-phosphate
  modified_base 8: mod_base = OTHER; note = adenosine-3'-phosphate
  modified_base 9: mod_base = OTHER; note = guanosine-3'-phosphate
  modified_base 10: mod_base = OTHER; note = cytidine-3'-phosphate
  modified_base 11: mod_base = OTHER; note = cytidine-3'-phosphate
  modified_base 12: mod_base = OTHER; note = adenosine-3'-phosphate
  modified_base 13: mod_base = OTHER; note = adenosine-3'-phosphate
  modified_base 14: mod_base = OTHER; note = cytidine-3'-phosphate
  modified_base 15: mod_base = OTHER; note = cytidine-3'-phosphate
  modified_base 16: mod_base = OTHER; note = cytidine-3'-phosphate
  modified_base 17: mod_base = OTHER; note = guanosine-3'-phosphate
  modified_base 18: mod_base = OTHER; note = cytidine-3'-phosphate
  modified_base 19: mod_base = OTHER; note = uridine-3'-phosphate
  misc_feature 1..19: note = RNA
  misc_feature 20..21: note = DNA
ctgtctcagccaacccgcttt

SEQ ID NO: 1030 - DNA, 21 bp, synthetic construct
  source 1..21: mol_type = other DNA
  modified_base 1: mod_base = OTHER; note = adenosine-3'-phosphate
  modified_base 2: mod_base = OTHER; note = guanosine-3'-phosphate
  modified_base 3: mod_base = OTHER; note = cytidine-3'-phosphate
  modified_base 4: mod_base = OTHER; note = guanosine-3'-phosphate
  modified_base 5: mod_base = OTHER; note = guanosine-3'-phosphate
  modified_base 6: mod_base = OTHER; note = guanosine-3'-phosphate
  modified_base 7: mod_base = OTHER; note = uridine-3'-phosphate
  modified_base 8: mod_base = OTHER; note = uridine-3'-phosphate
  modified_base 9: mod_base = OTHER; note = guanosine-3'-phosphate
  modified_base 10: mod_base = OTHER; note = guanosine-3'-phosphate
  modified_base 11: mod_base = OTHER; note = cytidine-3'-phosphate
  modified_base 12: mod_base = OTHER; note = uridine-3'-phosphate
  modified_base 13: mod_base = OTHER; note = guanosine-3'-phosphate
  modified_base 14: mod_base = OTHER; note = adenosine-3'-phosphate
  modified_base 15: mod_base = OTHER; note = guanosine-3'-phosphate
  modified_base 16: mod_base = OTHER; note = adenosine-3'-phosphate
  modified_base 17: mod_base = OTHER; note = cytidine-3'-phosphate
  modified_base 18: mod_base = OTHER; note = adenosine-3'-phosphate
  modified_base 19: mod_base = OTHER; note = guanosine-3'-phosphate
  misc_feature 1..19: note = RNA
  misc_feature 20..21: note = DNA
agcgggttggctgagacagtt

SEQ ID NO: 1031 - DNA, 21 bp, synthetic construct
  source 1..21: mol_type = other DNA
  modified_base 1: mod_base = OTHER; note = cytidine-3'-phosphate
  modified_base 2: mod_base = OTHER; note = uridine-3'-phosphate
  modified_base 3: mod_base = OTHER; note = cytidine-3'-phosphate
  modified_base 4: mod_base = OTHER; note = adenosine-3'-phosphate
  modified_base 5: mod_base = OTHER; note = guanosine-3'-phosphate
  modified_base 6: mod_base = OTHER; note = cytidine-3'-phosphate
  modified_base 7: mod_base = OTHER; note = cytidine-3'-phosphate
  modified_base 8: mod_base = OTHER; note = adenosine-3'-phosphate
  modified_base 9: mod_base = OTHER; note = adenosine-3'-phosphate
  modified_base 10: mod_base = OTHER; note = cytidine-3'-phosphate
  modified_base 11: mod_base = OTHER; note = cytidine-3'-phosphate
  modified_base 12: mod_base = OTHER; note = cytidine-3'-phosphate
  modified_base 13: mod_base = OTHER; note = guanosine-3'-phosphate
  modified_base 14: mod_base = OTHER; note = cytidine-3'-phosphate
  modified_base 15: mod_base = OTHER; note = uridine-3'-phosphate
  modified_base 16: mod_base = OTHER; note = cytidine-3'-phosphate
  modified_base 17: mod_base = OTHER; note = cytidine-3'-phosphate
  modified_base 18: mod_base = OTHER; note = adenosine-3'-phosphate
  modified_base 19: mod_base = OTHER; note = cytidine-3'-phosphate
  modified_base 20: mod_base = OTHER; note = 2'-deoxythymidine-3'-phosphorothioate
  misc_feature 1..19: note = RNA
  misc_feature 20..21: note = DNA
ctcagccaacccgctccactt

SEQ ID NO: 1032 - DNA, 21 bp, synthetic construct
  source 1..21: mol_type = other DNA
  modified_base 1: mod_base = OTHER; note = guanosine-3'-phosphate
  modified_base 2: mod_base = OTHER; note = uridine-3'-phosphate
  modified_base 3: mod_base = OTHER; note = guanosine-3'-phosphate
  modified_base 4: mod_base = OTHER; note = guanosine-3'-phosphate
  modified_base 5: mod_base = OTHER; note = adenosine-3'-phosphate
  modified_base 6: mod_base = OTHER; note = guanosine-3'-phosphate
  modified_base 7: mod_base = OTHER; note = cytidine-3'-phosphate
  modified_base 8: mod_base = OTHER; note = guanosine-3'-phosphate
  modified_base 9: mod_base = OTHER; note = guanosine-3'-phosphate
  modified_base 10: mod_base = OTHER; note = guanosine-3'-phosphate
  modified_base 11: mod_base = OTHER; note = uridine-3'-phosphate
  modified_base 12: mod_base = OTHER; note = uridine-3'-phosphate
  modified_base 13: mod_base = OTHER; note = guanosine-3'-phosphate
  modified_base 14: mod_base = OTHER; note = guanosine-3'-phosphate
  modified_base 15: mod_base = OTHER; note = cytidine-3'-phosphate
  modified_base 16: mod_base = OTHER; note = uridine-3'-phosphate
  modified_base 17: mod_base = OTHER; note = guanosine-3'-phosphate
  modified_base 18: mod_base = OTHER; note = adenosine-3'-phosphate
  modified_base 19: mod_base = OTHER; note = guanosine-3'-phosphate
  modified_base 20: mod_base = OTHER; note = 2'-deoxythymidine-3'-phosphorothioate
  misc_feature 1..19: note = RNA
  misc_feature 20..21: note = DNA
gtggagcgggttggctgagtt

SEQ ID NO: 1033 - DNA, 21 bp, synthetic construct
  source 1..21: mol_type = other DNA
  modified_base 1: mod_base = OTHER; note = 2'-O-methylcytidine-3'-phosphate
  modified_base 2: mod_base = OTHER; note = 2'-O-methyluridine-3'-phosphate
  modified_base 3: mod_base = OTHER; note = 2'-O-methylcytidine-3'-phosphate
  modified_base 4: mod_base = OTHER; note = adenosine-3'-phosphate
  modified_base 5: mod_base = OTHER; note = guanosine-3'-phosphate
  modified_base 6: mod_base = OTHER; note = 2'-O-methylcytidine-3'-phosphate
  modified_base 7: mod_base = OTHER; note = 2'-O-methylcytidine-3'-phosphate
  modified_base 8: mod_base = OTHER; note = adenosine-3'-phosphate
  modified_base 9: mod_base = OTHER; note = adenosine-3'-phosphate
  modified_base 10: mod_base = OTHER; note = 2'-O-methylcytidine-3'-phosphate
  modified_base 11: mod_base = OTHER; note = 2'-O-methylcytidine-3'-phosphate
  modified_base 12: mod_base = OTHER; note = 2'-O-methylcytidine-3'-phosphate
  modified_base 13: mod_base = OTHER; note = guanosine-3'-phosphate
  modified_base 14: mod_base = OTHER; note = 2'-O-methylcytidine-3'-phosphate
  modified_base 15: mod_base = OTHER; note = 2'-O-methyluridine-3'-phosphate
  modified_base 16: mod_base = OTHER; note = 2'-O-methylcytidine-3'-phosphate
  modified_base 17: mod_base = OTHER; note = 2'-O-methylcytidine-3'-phosphate
  modified_base 18: mod_base = OTHER; note = adenosine-3'-phosphate
  modified_base 19: mod_base = OTHER; note = 2'-O-methylcytidine-3'-phosphate
  modified_base 20: mod_base = OTHER; note = 2'-deoxythymidine-3'-phosphorothioate
  misc_feature 1..19: note = RNA
  misc_feature 20..21: note = DNA
ctcagccaacccgctccactt

SEQ ID NO: 1034 - DNA, 21 bp, synthetic construct
  source 1..21: mol_type = other DNA
  modified_base 1: mod_base = OTHER; note = guanosine-3'-phosphate
  modified_base 2: mod_base = OTHER; note = uridine-3'-phosphate
  modified_base 3: mod_base = OTHER; note = guanosine-3'-phosphate
  modified_base 4: mod_base = OTHER; note = guanosine-3'-phosphate
  modified_base 5: mod_base = OTHER; note = adenosine-3'-phosphate
  modified_base 6: mod_base = OTHER; note = guanosine-3'-phosphate
  modified_base 7: mod_base = OTHER; note = cytidine-3'-phosphate
  modified_base 8: mod_base = OTHER; note = guanosine-3'-phosphate
  modified_base 9: mod_base = OTHER; note = guanosine-3'-phosphate
  modified_base 10: mod_base = OTHER; note = guanosine-3'-phosphate
  modified_base 11: mod_base = OTHER; note = uridine-3'-phosphate
  modified_base 12: mod_base = OTHER; note = uridine-3'-phosphate
  modified_base 13: mod_base = OTHER; note = guanosine-3'-phosphate
  modified_base 14: mod_base = OTHER; note = guanosine-3'-phosphate
  modified_base 15: mod_base = OTHER; note = cytidine-3'-phosphate
  modified_base 16: mod_base = OTHER; note = uridine-3'-phosphate
  modified_base 17: mod_base = OTHER; note = guanosine-3'-phosphate
  modified_base 18: mod_base = OTHER; note = adenosine-3'-phosphate
  modified_base 19: mod_base = OTHER; note = guanosine-3'-phosphate
  modified_base 20: mod_base = OTHER; note = 2'-deoxythymidine-3'-phosphorothioate
  misc_feature 1..19: note = RNA
  misc_feature 20..21: note = DNA
gtggagcgggttggctgagtt

SEQ ID NO: 1035 - DNA, 21 bp, synthetic construct
  source 1..21: mol_type = other DNA
  modified_base 1: mod_base = OTHER; note = guanosine-3'-phosphate
  modified_base 2: mod_base = OTHER; note = cytidine-3'-phosphate
  modified_base 3: mod_base = OTHER; note = cytidine-3'-phosphate
  modified_base 4: mod_base = OTHER; note = adenosine-3'-phosphate
  modified_base 5: mod_base = OTHER; note = adenosine-3'-phosphate
  modified_base 6: mod_base = OTHER; note = cytidine-3'-phosphate
  modified_base 7: mod_base = OTHER; note = cytidine-3'-phosphate
  modified_base 8: mod_base = OTHER; note = cytidine-3'-phosphate
  modified_base 9: mod_base = OTHER; note = guanosine-3'-phosphate
  modified_base 10: mod_base = OTHER; note = cytidine-3'-phosphate
  modified_base 11: mod_base = OTHER; note = uridine-3'-phosphate
  modified_base 12: mod_base = OTHER; note = cytidine-3'-phosphate
  modified_base 13: mod_base = OTHER; note = cytidine-3'-phosphate
  modified_base 14: mod_base = OTHER; note = adenosine-3'-phosphate
  modified_base 15: mod_base = OTHER; note = cytidine-3'-phosphate
  modified_base 16: mod_base = OTHER; note = uridine-3'-phosphate
  modified_base 17: mod_base = OTHER; note = adenosine-3'-phosphate
  modified_base 18: mod_base = OTHER; note = cytidine-3'-phosphate
  modified_base 19: mod_base = OTHER; note = cytidine-3'-phosphate
  modified_base 20: mod_base = OTHER; note = 2'-deoxythymidine-3'-phosphorothioate
  misc_feature 1..19: note = RNA
  misc_feature 20..21: note = DNA
gccaacccgctccactacctt

SEQ ID NO: 1036 - DNA, 21 bp, synthetic construct
  source 1..21: mol_type = other DNA
  modified_base 1: mod_base = OTHER; note = guanosine-3'-phosphate
  modified_base 2: mod_base = OTHER; note = guanosine-3'-phosphate
  modified_base 3: mod_base = OTHER; note = uridine-3'-phosphate
  modified_base 4: mod_base = OTHER; note = adenosine-3'-phosphate
  modified_base 5: mod_base = OTHER; note = guanosine-3'-phosphate
  modified_base 6: mod_base = OTHER; note = uridine-3'-phosphate
  modified_base 7: mod_base = OTHER; note = guanosine-3'-phosphate
  modified_base 8: mod_base = OTHER; note = guanosine-3'-phosphate
  modified_base 9: mod_base = OTHER; note = adenosine-3'-phosphate
  modified_base 10: mod_base = OTHER; note = guanosine-3'-phosphate
  modified_base 11: mod_base = OTHER; note = cytidine-3'-phosphate
  modified_base 12: mod_base = OTHER; note = guanosine-3'-phosphate
  modified_base 13: mod_base = OTHER; note = guanosine-3'-phosphate
  modified_base 14: mod_base = OTHER; note = guanosine-3'-phosphate
  modified_base 15: mod_base = OTHER; note = uridine-3'-phosphate
  modified_base 16: mod_base = OTHER; note = uridine-3'-phosphate
  modified_base 17: mod_base = OTHER; note = guanosine-3'-phosphate
  modified_base 18: mod_base = OTHER; note = guanosine-3'-phosphate
  modified_base 19: mod_base = OTHER; note = cytidine-3'-phosphate
  modified_base 20: mod_base = OTHER; note = 2'-deoxythymidine-3'-phosphorothioate
  misc_feature 1..19: note = RNA
  misc_feature 20..21: note = DNA
ggtagtggagcgggttggctt

SEQ ID NO: 1037 - DNA, 21 bp, synthetic construct
  source 1..21: mol_type = other DNA
  modified_base 1: mod_base = OTHER; note = guanosine-3'-phosphate
  modified_base 2: mod_base = OTHER; note = 2'-O-methylcytidine-3'-phosphate
  modified_base 3: mod_base = OTHER; note = 2'-O-methylcytidine-3'-phosphate
  modified_base 4: mod_base = OTHER; note = adenosine-3'-phosphate
  modified_base 5: mod_base = OTHER; note = adenosine-3'-phosphate
  modified_base 6: mod_base = OTHER; note = 2'-O-methylcytidine-3'-phosphate
  modified_base 7: mod_base = OTHER; note = 2'-O-methylcytidine-3'-phosphate
  modified_base 8: mod_base = OTHER; note = 2'-O-methylcytidine-3'-phosphate
  modified_base 9: mod_base = OTHER; note = guanosine-3'-phosphate
  modified_base 10: mod_base = OTHER; note = 2'-O-methylcytidine-3'-phosphate
  modified_base 11: mod_base = OTHER; note = 2'-O-methyluridine-3'-phosphate
  modified_base 12: mod_base = OTHER; note = 2'-O-methylcytidine-3'-phosphate
  modified_base 13: mod_base = OTHER; note = 2'-O-methylcytidine-3'-phosphate
  modified_base 14: mod_base = OTHER; note = adenosine-3'-phosphate
  modified_base 15: mod_base = OTHER; note = 2'-O-methylcytidine-3'-phosphate
  modified_base 16: mod_base = OTHER; note = 2'-O-methyluridine-3'-phosphate
  modified_base 17: mod_base = OTHER; note = adenosine-3'-phosphate
  modified_base 18: mod_base = OTHER; note = 2'-O-methylcytidine-3'-phosphate
  modified_base 19: mod_base = OTHER; note = 2'-O-methylcytidine-3'-phosphate
  modified_base 20: mod_base = OTHER; note = 2'-deoxythymidine-3'-phosphorothioate
  misc_feature 1..19: note = RNA
  misc_feature 20..21: note = DNA
gccaacccgctccactacctt

SEQ ID NO: 1038 - DNA, 21 bp, synthetic construct
  source 1..21: mol_type = other DNA
  modified_base 1: mod_base = OTHER; note = guanosine-3'-phosphate
  modified_base 2: mod_base = OTHER; note = guanosine-3'-phosphate
  modified_base 3: mod_base = OTHER; note = 2'-O-methyluridine-3'-phosphate
  modified_base 4: mod_base = OTHER; note = adenosine-3'-phosphate
  modified_base 5: mod_base = OTHER; note = guanosine-3'-phosphate
  modified_base 6: mod_base = OTHER; note = uridine-3'-phosphate
  modified_base 7: mod_base = OTHER; note = guanosine-3'-phosphate
  modified_base 8: mod_base = OTHER; note = guanosine-3'-phosphate
  modified_base 9: mod_base = OTHER; note = adenosine-3'-phosphate
  modified_base 10: mod_base = OTHER; note = guanosine-3'-phosphate
  modified_base 11: mod_base = OTHER; note = cytidine-3'-phosphate
  modified_base 12: mod_base = OTHER; note = guanosine-3'-phosphate
  modified_base 13: mod_base = OTHER; note = guanosine-3'-phosphate
  modified_base 14: mod_base = OTHER; note = guanosine-3'-phosphate
  modified_base 15: mod_base = OTHER; note = uridine-3'-phosphate
  modified_base 16: mod_base = OTHER; note = uridine-3'-phosphate
  modified_base 17: mod_base = OTHER; note = guanosine-3'-phosphate
  modified_base 18: mod_base = OTHER; note = guanosine-3'-phosphate
  modified_base 19: mod_base = OTHER; note = cytidine-3'-phosphate
  modified_base 20: mod_base = OTHER; note = 2'-deoxythymidine-3'-phosphorothioate
  misc_feature 1..19: note = RNA
  misc_feature 20..21: note = DNA
ggtagtggagcgggttggctt

SEQ ID NO: 1039 - DNA, 21 bp, synthetic construct
  source 1..21: mol_type = other DNA
  modified_base 1: mod_base = OTHER; note = adenosine-3'-phosphate
  modified_base 2: mod_base = OTHER; note = adenosine-3'-phosphate
  modified_base 3: mod_base = OTHER; note = cytidine-3'-phosphate
  modified_base 4: mod_base = OTHER; note = cytidine-3'-phosphate
  modified_base 5: mod_base = OTHER; note = cytidine-3'-phosphate
  modified_base 6: mod_base = OTHER; note = guanosine-3'-phosphate
  modified_base 7: mod_base = OTHER; note = cytidine-3'-phosphate
  modified_base 8: mod_base = OTHER; note = uridine-3'-phosphate
  modified_base 9: mod_base = OTHER; note = cytidine-3'-phosphate
  modified_base 10: mod_base = OTHER; note = cytidine-3'-phosphate
  modified_base 11: mod_base = OTHER; note = adenosine-3'-phosphate
  modified_base 12: mod_base = OTHER; note = cytidine-3'-phosphate
  modified_base 13: mod_base = OTHER; note = uridine-3'-phosphate
  modified_base 14: mod_base = OTHER; note = adenosine-3'-phosphate
  modified_base 15: mod_base = OTHER; note = cytidine-3'-phosphate
  modified_base 16: mod_base = OTHER; note = cytidine-3'-phosphate
  modified_base 17: mod_base = OTHER; note = cytidine-3'-phosphate
  modified_base 18: mod_base = OTHER; note = guanosine-3'-phosphate
  modified_base 19: mod_base = OTHER; note = guanosine-3'-phosphate
  misc_feature 1..19: note = RNA
  misc_feature 20..21: note = DNA
aacccgctccactacccggtt

SEQ ID NO: 1040 - DNA, 21 bp, synthetic construct
  source 1..21: mol_type = other DNA
  modified_base 1: mod_base = OTHER; note = cytidine-3'-phosphate
  modified_base 2: mod_base = OTHER; note = cytidine-3'-phosphate
  modified_base 3: mod_base = OTHER; note = guanosine-3'-phosphate
  modified_base 4: mod_base = OTHER; note = guanosine-3'-phosphate
  modified_base 5: mod_base = OTHER; note = guanosine-3'-phosphate
  modified_base 6: mod_base = OTHER; note = uridine-3'-phosphate
  modified_base 7: mod_base = OTHER; note = adenosine-3'-phosphate
  modified_base 8: mod_base = OTHER; note = guanosine-3'-phosphate
  modified_base 9: mod_base = OTHER; note = uridine-3'-phosphate
  modified_base 10: mod_base = OTHER; note = guanosine-3'-phosphate
  modified_base 11: mod_base = OTHER; note = guanosine-3'-phosphate
  modified_base 12: mod_base = OTHER; note = adenosine-3'-phosphate
  modified_base 13: mod_base = OTHER; note = guanosine-3'-phosphate
  modified_base 14: mod_base = OTHER; note = cytidine-3'-phosphate
  modified_base 15: mod_base = OTHER; note = guanosine-3'-phosphate
  modified_base 16: mod_base = OTHER; note = guanosine-3'-phosphate
  modified_base 17: mod_base = OTHER; note = guanosine-3'-phosphate
  modified_base 18: mod_base = OTHER; note = uridine-3'-phosphate
  modified_base 19: mod_base = OTHER; note = uridine-3'-phosphate
  misc_feature 1..19: note = RNA
  misc_feature 20..21: note = DNA
ccgggtagtggagcgggtttt

SEQ ID NO: 1041 - DNA, 21 bp, synthetic construct
  source 1..21: mol_type = other DNA
  modified_base 1: mod_base = OTHER; note = cytidine-3'-phosphate
  modified_base 2: mod_base = OTHER; note = cytidine-3'-phosphate
  modified_base 3: mod_base = OTHER; note = guanosine-3'-phosphate
  modified_base 4: mod_base = OTHER; note = cytidine-3'-phosphate
  modified_base 5: mod_base = OTHER; note = uridine-3'-phosphate
  modified_base 6: mod_base = OTHER; note = cytidine-3'-phosphate
  modified_base 7: mod_base = OTHER; note = cytidine-3'-phosphate
  modified_base 8: mod_base = OTHER; note = adenosine-3'-phosphate
  modified_base 9: mod_base = OTHER; note = cytidine-3'-phosphate
  modified_base 10: mod_base = OTHER; note = uridine-3'-phosphate
  modified_base 11: mod_base = OTHER; note = adenosine-3'-phosphate
  modified_base 12: mod_base = OTHER; note = cytidine-3'-phosphate
  modified_base 13: mod_base = OTHER; note = cytidine-3'-phosphate
  modified_base 14: mod_base = OTHER; note = cytidine-3'-phosphate
  modified_base 15: mod_base = OTHER; note = guanosine-3'-phosphate
  modified_base 16: mod_base = OTHER; note = guanosine-3'-phosphate
  modified_base 17: mod_base = OTHER; note = cytidine-3'-phosphate
  modified_base 18: mod_base = OTHER; note = adenosine-3'-phosphate
  modified_base 19: mod_base = OTHER; note = guanosine-3'-phosphate
  misc_feature 1..19: note = RNA
  misc_feature 20..21: note = DNA
ccgctccactacccggcagtt

SEQ ID NO: 1042 - DNA, 21 bp, synthetic construct
  source 1..21: mol_type = other DNA
  modified_base 1: mod_base = OTHER; note = cytidine-3'-phosphate
  modified_base 2: mod_base = OTHER; note = uridine-3'-phosphate
  modified_base 3: mod_base = OTHER; note = guanosine-3'-phosphate
  modified_base 4: mod_base = OTHER; note = cytidine-3'-phosphate
  modified_base 5: mod_base = OTHER; note = cytidine-3'-phosphate
  modified_base 6: mod_base = OTHER; note = guanosine-3'-phosphate
  modified_base 7: mod_base = OTHER; note = guanosine-3'-phosphate
  modified_base 8: mod_base = OTHER; note = guanosine-3'-phosphate
  modified_base 9: mod_base = OTHER; note = uridine-3'-phosphate
  modified_base 10: mod_base = OTHER; note = adenosine-3'-phosphate
  modified_base 11: mod_base = OTHER; note = guanosine-3'-phosphate
  modified_base 12: mod_base = OTHER; note = uridine-3'-phosphate
  modified_base 13: mod_base = OTHER; note = guanosine-3'-phosphate
  modified_base 14: mod_base = OTHER; note = guanosine-3'-phosphate
  modified_base 15: mod_base = OTHER; note = adenosine-3'-phosphate
  modified_base 16: mod_base = OTHER; note = guanosine-3'-phosphate
  modified_base 17: mod_base = OTHER; note = cytidine-3'-phosphate
  modified_base 18: mod_base = OTHER; note = guanosine-3'-phosphate
  modified_base 19: mod_base = OTHER; note = guanosine-3'-phosphate
  misc_feature 1..19: note = RNA
  misc_feature 20..21: note = DNA
ctgccgggtagtggagcggtt

SEQ ID NO: 1043 - DNA, 21 bp, synthetic construct
  source 1..21: mol_type = other DNA
  modified_base 1: mod_base = OTHER; note = cytidine-3'-phosphate
  modified_base 2: mod_base = OTHER; note = uridine-3'-phosphate
  modified_base 3: mod_base = OTHER; note = adenosine-3'-phosphate
  modified_base 4: mod_base = OTHER; note = cytidine-3'-phosphate
  modified_base 5: mod_base = OTHER; note = cytidine-3'-phosphate
  modified_base 6: mod_base = OTHER; note = cytidine-3'-phosphate
  modified_base 7: mod_base = OTHER; note = guanosine-3'-phosphate
  modified_base 8: mod_base = OTHER; note = guanosine-3'-phosphate
  modified_base 9: mod_base = OTHER; note = cytidine-3'-phosphate
  modified_base 10: mod_base = OTHER; note = adenosine-3'-phosphate
  modified_base 11: mod_base = OTHER; note = guanosine-3'-phosphate
  modified_base 12: mod_base = OTHER; note = guanosine-3'-phosphate
  modified_base 13: mod_base = OTHER; note = guanosine-3'-phosphate
  modified_base 14: mod_base = OTHER; note = uridine-3'-phosphate
  modified_base 15: mod_base = OTHER; note = adenosine-3'-phosphate
  modified_base 16: mod_base = OTHER; note = cytidine-3'-phosphate
  modified_base 17: mod_base = OTHER; note = adenosine-3'-phosphate
  modified_base 18: mod_base = OTHER; note = cytidine-3'-phosphate
  modified_base 19: mod_base = OTHER; note = adenosine-3'-phosphate
  misc_feature 1..19: note = RNA
  misc_feature 20..21: note = DNA
ctacccggcagggtacacatt

SEQ ID NO: 1044 - DNA, 21 bp, synthetic construct
  source 1..21: mol_type = other DNA
  modified_base 1: mod_base = OTHER; note = uridine-3'-phosphate
  modified_base 2: mod_base = OTHER; note = guanosine-3'-phosphate
  modified_base 3: mod_base = OTHER; note = uridine-3'-phosphate
  modified_base 4: mod_base = OTHER; note = guanosine-3'-phosphate
  modified_base 5: mod_base = OTHER; note = uridine-3'-phosphate
  modified_base 6: mod_base = OTHER; note = adenosine-3'-phosphate
  modified_base 7: mod_base = OTHER; note = cytidine-3'-phosphate
  modified_base 8: mod_base = OTHER; note = cytidine-3'-phosphate
  modified_base 9: mod_base = OTHER; note = cytidine-3'-phosphate
  modified_base 10: mod_base = OTHER; note = uridine-3'-phosphate
  modified_base 11: mod_base = OTHER; note = guanosine-3'-phosphate
  modified_base 12: mod_base = OTHER; note = cytidine-3'-phosphate
  modified_base 13: mod_base = OTHER; note = cytidine-3'-phosphate
  modified_base 14: mod_base = OTHER; note = guanosine-3'-phosphate
  modified_base 15: mod_base = OTHER; note = guanosine-3'-phosphate
  modified_base 16: mod_base = OTHER; note = guanosine-3'-phosphate
  modified_base 17: mod_base = OTHER; note = uridine-3'-phosphate
  modified_base 18: mod_base = OTHER; note = adenosine-3'-phosphate
  modified_base 19: mod_base = OTHER; note = guanosine-3'-phosphate
  misc_feature 1..19: note = RNA
  misc_feature 20..21: note = DNA
tgtgtaccctgccgggtagtt

SEQ ID NO: 1045 - DNA, 21 bp, synthetic construct
  source 1..21: mol_type = other DNA
  modified_base 1: mod_base = OTHER; note = uridine-3'-phosphate
  modified_base 2: mod_base = OTHER; note = adenosine-3'-phosphate
  modified_base 3: mod_base = OTHER; note = cytidine-3'-phosphate
  modified_base 4: mod_base = OTHER; note = cytidine-3'-phosphate
  modified_base 5: mod_base = OTHER; note = cytidine-3'-phosphate
  modified_base 6: mod_base = OTHER; note = guanosine-3'-phosphate
  modified_base 7: mod_base = OTHER; note = guanosine-3'-phosphate
  modified_base 8: mod_base = OTHER; note = cytidine-3'-phosphate
  modified_base 9: mod_base = OTHER; note = adenosine-3'-phosphate
  modified_base 10: mod_base = OTHER; note = guanosine-3'-phosphate
  modified_base 11: mod_base = OTHER; note = guanosine-3'-phosphate
  modified_base 12: mod_base = OTHER; note = guanosine-3'-phosphate
  modified_base 13: mod_base = OTHER; note = uridine-3'-phosphate
  modified_base 14: mod_base = OTHER; note = adenosine-3'-phosphate
  modified_base 15: mod_base = OTHER; note = cytidine-3'-phosphate
  modified_base 16: mod_base = OTHER; note = adenosine-3'-phosphate
  modified_base 17: mod_base = OTHER; note = cytidine-3'-phosphate
  modified_base 18: mod_base = OTHER; note = adenosine-3'-phosphate
  modified_base 19: mod_base = OTHER; note = uridine-3'-phosphate
  misc_feature 1..19: note = RNA
  misc_feature 20..21: note = DNA
tacccggcagggtacacattt

SEQ ID NO: 1046 - DNA, 21 bp, synthetic construct
  source 1..21: mol_type = other DNA
  modified_base 1: mod_base = OTHER; note = adenosine-3'-phosphate
  modified_base 2: mod_base = OTHER; note = uridine-3'-phosphate
  modified_base 3: mod_base = OTHER; note = guanosine-3'-phosphate
  modified_base 4: mod_base = OTHER; note = uridine-3'-phosphate
  modified_base 5: mod_base = OTHER; note = guanosine-3'-phosphate
  modified_base 6: mod_base = OTHER; note = uridine-3'-phosphate
  modified_base 7: mod_base = OTHER; note = adenosine-3'-phosphate
  modified_base 8: mod_base = OTHER; note = cytidine-3'-phosphate
  modified_base 9: mod_base = OTHER; note = cytidine-3'-phosphate
  modified_base 10: mod_base = OTHER; note = cytidine-3'-phosphate
  modified_base 11: mod_base = OTHER; note = uridine-3'-phosphate
  modified_base 12: mod_base = OTHER; note = guanosine-3'-phosphate
  modified_base 13: mod_base = OTHER; note = cytidine-3'-phosphate
  modified_base 14: mod_base = OTHER; note = cytidine-3'-phosphate
  modified_base 15: mod_base = OTHER; note = guanosine-3'-phosphate
  modified_base 16: mod_base = OTHER; note = guanosine-3'-phosphate
  modified_base 17: mod_base = OTHER; note = guanosine-3'-phosphate
  modified_base 18: mod_base = OTHER; note = uridine-3'-phosphate
  modified_base 19: mod_base = OTHER; note = adenosine-3'-phosphate
  misc_feature 1..19: note = RNA
  misc_feature 20..21: note = DNA
atgtgtaccctgccgggtatt

SEQ ID NO: 1047 - DNA, 21 bp, synthetic construct
  source 1..21: mol_type = other DNA
  modified_base 1: mod_base = OTHER; note = adenosine-3'-phosphate
  modified_base 2: mod_base = OTHER; note = cytidine-3'-phosphate
  modified_base 3: mod_base = OTHER; note = cytidine-3'-phosphate
  modified_base 4: mod_base = OTHER; note = cytidine-3'-phosphate
  modified_base 5: mod_base = OTHER; note = guanosine-3'-phosphate
  modified_base 6: mod_base = OTHER; note = guanosine-3'-phosphate
  modified_base 7: mod_base = OTHER; note = cytidine-3'-phosphate
  modified_base 8: mod_base = OTHER; note = adenosine-3'-phosphate
  modified_base 9: mod_base = OTHER; note = guanosine-3'-phosphate
  modified_base 10: mod_base = OTHER; note = guanosine-3'-phosphate
  modified_base 11: mod_base = OTHER; note = guanosine-3'-phosphate
  modified_base 12: mod_base = OTHER; note = uridine-3'-phosphate
  modified_base 13: mod_base = OTHER; note = adenosine-3'-phosphate
  modified_base 14: mod_base = OTHER; note = cytidine-3'-phosphate
  modified_base 15: mod_base = OTHER; note = adenosine-3'-phosphate
  modified_base 16: mod_base = OTHER; note = cytidine-3'-phosphate
  modified_base 17: mod_base = OTHER; note = adenosine-3'-phosphate
  modified_base 18: mod_base = OTHER; note = uridine-3'-phosphate
  modified_base 19: mod_base = OTHER; note = uridine-3'-phosphate
  misc_feature 1..19: note = RNA
  misc_feature 20..21: note = DNA
acccggcagggtacacatttt

SEQ ID NO: 1048 - DNA, 21 bp, synthetic construct
  source 1..21: mol_type = other DNA
  modified_base 1: mod_base = OTHER; note = adenosine-3'-phosphate
  modified_base 2: mod_base = OTHER; note = adenosine-3'-phosphate
  modified_base 3: mod_base = OTHER; note = uridine-3'-phosphate
  modified_base 4: mod_base = OTHER; note = guanosine-3'-phosphate
  modified_base 5: mod_base = OTHER; note = uridine-3'-phosphate
  modified_base 6: mod_base = OTHER; note = guanosine-3'-phosphate
  modified_base 7: mod_base = OTHER; note = uridine-3'-phosphate
  modified_base 8: mod_base = OTHER; note = adenosine-3'-phosphate
  modified_base 9: mod_base = OTHER; note = cytidine-3'-phosphate
  modified_base 10: mod_base = OTHER; note = cytidine-3'-phosphate
  modified_base 11: mod_base = OTHER; note = cytidine-3'-phosphate
  modified_base 12: mod_base = OTHER; note = uridine-3'-phosphate
  modified_base 13: mod_base = OTHER; note = guanosine-3'-phosphate
  modified_base 14: mod_base = OTHER; note = cytidine-3'-phosphate
  modified_base 15: mod_base = OTHER; note = cytidine-3'-phosphate
  modified_base 16: mod_base = OTHER; note = guanosine-3'-phosphate
  modified_base 17: mod_base = OTHER; note = guanosine-3'-phosphate
  modified_base 18: mod_base = OTHER; note = guanosine-3'-phosphate
  modified_base 19: mod_base = OTHER; note = uridine-3'-phosphate
  misc_feature 1..19: note = RNA
  misc_feature 20..21: note = DNA
aatgtgtaccctgccgggttt

SEQ ID NO: 1049 - DNA, 21 bp, synthetic construct
  source 1..21: mol_type = other DNA
  modified_base 1: mod_base = OTHER; note = cytidine-3'-phosphate
  modified_base 2: mod_base = OTHER; note = cytidine-3'-phosphate
  modified_base 3: mod_base = OTHER; note = cytidine-3'-phosphate
  modified_base 4: mod_base = OTHER; note = guanosine-3'-phosphate
  modified_base 5: mod_base = OTHER; note = guanosine-3'-phosphate
  modified_base 6: mod_base = OTHER; note = cytidine-3'-phosphate
  modified_base 7: mod_base = OTHER; note = adenosine-3'-phosphate
  modified_base 8: mod_base = OTHER; note = guanosine-3'-phosphate
  modified_base 9: mod_base = OTHER; note = guanosine-3'-phosphate
  modified_base 10: mod_base = OTHER; note = guanosine-3'-phosphate
  modified_base 11: mod_base = OTHER; note = uridine-3'-phosphate
  modified_base 12: mod_base = OTHER; note = adenosine-3'-phosphate
  modified_base 13: mod_base = OTHER; note = cytidine-3'-phosphate
  modified_base 14: mod_base = OTHER; note = adenosine-3'-phosphate
  modified_base 15: mod_base = OTHER; note = cytidine-3'-phosphate
  modified_base 16: mod_base = OTHER; note = adenosine-3'-phosphate
  modified_base 17: mod_base = OTHER; note = uridine-3'-phosphate
  modified_base 18: mod_base = OTHER; note = uridine-3'-phosphate
  modified_base 19: mod_base = OTHER; note = cytidine-3'-phosphate
  misc_feature 1..19: note = RNA
  misc_feature 20..21: note = DNA
cccggcagggtacacattctt

SEQ ID NO: 1050 - DNA, 21 bp, synthetic construct
  source 1..21: mol_type = other DNA
  modified_base 1: mod_base = OTHER; note = guanosine-3'-phosphate
  modified_base 2: mod_base = OTHER; note = adenosine-3'-phosphate
  modified_base 3: mod_base = OTHER; note = adenosine-3'-phosphate
  modified_base 4: mod_base = OTHER; note = uridine-3'-phosphate
  modified_base 5: mod_base = OTHER; note = guanosine-3'-phosphate
  modified_base 6: mod_base = OTHER; note = uridine-3'-phosphate
  modified_base 7: mod_base = OTHER; note = guanosine-3'-phosphate
  modified_base 8: mod_base = OTHER; note = uridine-3'-phosphate
  modified_base 9: mod_base = OTHER; note = adenosine-3'-phosphate
  modified_base 10: mod_base = OTHER; note = cytidine-3'-phosphate
  modified_base 11: mod_base = OTHER; note = cytidine-3'-phosphate
  modified_base 12: mod_base = OTHER; note = cytidine-3'-phosphate
  modified_base 13: mod_base = OTHER; note = uridine-3'-phosphate
  modified_base 14: mod_base = OTHER; note = guanosine-3'-phosphate
  modified_base 15: mod_base = OTHER; note = cytidine-3'-phosphate
  modified_base 16: mod_base = OTHER; note = cytidine-3'-phosphate
  modified_base 17: mod_base = OTHER; note = guanosine-3'-phosphate
  modified_base 18: mod_base = OTHER; note = guanosine-3'-phosphate
  modified_base 19: mod_base = OTHER; note = guanosine-3'-phosphate
  misc_feature 1..19: note = RNA
  misc_feature 20..21: note = DNA
gaatgtgtaccctgccgggtt

SEQ ID NO: 1051 - DNA, 21 bp, synthetic construct
  source 1..21: mol_type = other DNA
  modified_base 1: mod_base = OTHER; note = cytidine-3'-phosphate
  modified_base 2: mod_base = OTHER; note = guanosine-3'-phosphate
  modified_base 3: mod_base = OTHER; note = guanosine-3'-phosphate
  modified_base 4: mod_base = OTHER; note = cytidine-3'-phosphate
  modified_base 5: mod_base = OTHER; note = adenosine-3'-phosphate
  modified_base 6: mod_base = OTHER; note = guanosine-3'-phosphate
  modified_base 7: mod_base = OTHER; note = guanosine-3'-phosphate
  modified_base 8: mod_base = OTHER; note = guanosine-3'-phosphate
  modified_base 9: mod_base = OTHER; note = uridine-3'-phosphate
  modified_base 10: mod_base = OTHER; note = adenosine-3'-phosphate
  modified_base 11: mod_base = OTHER; note = cytidine-3'-phosphate
  modified_base 12: mod_base = OTHER; note = adenosine-3'-phosphate
  modified_base 13: mod_base = OTHER; note = cytidine-3'-phosphate
  modified_base 14: mod_base = OTHER; note = adenosine-3'-phosphate
  modified_base 15: mod_base = OTHER; note = uridine-3'-phosphate
  modified_base 16: mod_base = OTHER; note = uridine-3'-phosphate
  modified_base 17: mod_base = OTHER; note = cytidine-3'-phosphate
  modified_base 18: mod_base = OTHER; note = guanosine-3'-phosphate
  modified_base 19: mod_base = OTHER; note = cytidine-3'-phosphate
  misc_feature 1..19: note = RNA
  misc_feature 20..21: note = DNA
cggcagggtacacattcgctt

SEQ ID NO: 1052 - DNA, 21 bp, synthetic construct
  source 1..21: mol_type = other DNA
  modified_base 1: mod_base = OTHER; note = guanosine-3'-phosphate
  modified_base 2: mod_base = OTHER; note = cytidine-3'-phosphate
  modified_base 3: mod_base = OTHER; note = guanosine-3'-phosphate
  modified_base 4: mod_base = OTHER; note = adenosine-3'-phosphate
  modified_base 5: mod_base = OTHER; note = adenosine-3'-phosphate
  modified_base 6: mod_base = OTHER; note = uridine-3'-phosphate
  modified_base 7: mod_base = OTHER; note = guanosine-3'-phosphate
  modified_base 8: mod_base = OTHER; note = uridine-3'-phosphate
  modified_base 9: mod_base = OTHER; note = guanosine-3'-phosphate
  modified_base 10: mod_base = OTHER; note = uridine-3'-phosphate
  modified_base 11: mod_base = OTHER; note = adenosine-3'-phosphate
  modified_base 12: mod_base = OTHER; note = cytidine-3'-phosphate
  modified_base 13: mod_base = OTHER; note = cytidine-3'-phosphate
  modified_base 14: mod_base = OTHER; note = cytidine-3'-phosphate
  modified_base 15: mod_base = OTHER; note = uridine-3'-phosphate
  modified_base 16: mod_base = OTHER; note = guanosine-3'-phosphate
  modified_base 17: mod_base = OTHER; note = cytidine-3'-phosphate
  modified_base 18: mod_base = OTHER; note = cytidine-3'-phosphate
  modified_base 19: mod_base = OTHER; note = guanosine-3'-phosphate
  misc_feature 1..19: note = RNA
  misc_feature 20..21: note = DNA
gcgaatgtgtaccctgccgtt

SEQ ID NO: 1053 - DNA, 21 bp, synthetic construct
  source 1..21: mol_type = other DNA
  modified_base 1: mod_base = OTHER; note = guanosine-3'-phosphate
  modified_base 2: mod_base = OTHER; note = cytidine-3'-phosphate
  modified_base 3: mod_base = OTHER; note = adenosine-3'-phosphate
  modified_base 4: mod_base = OTHER; note = guanosine-3'-phosphate
  modified_base 5: mod_base = OTHER; note = guanosine-3'-phosphate
  modified_base 6: mod_base = OTHER; note = guanosine-3'-phosphate
  modified_base 7: mod_base = OTHER; note = uridine-3'-phosphate
  modified_base 8: mod_base = OTHER; note = adenosine-3'-phosphate
  modified_base 9: mod_base = OTHER; note = cytidine-3'-phosphate
  modified_base 10: mod_base = OTHER; note = adenosine-3'-phosphate
  modified_base 11: mod_base = OTHER; note = cytidine-3'-phosphate
  modified_base 12: mod_base = OTHER; note = adenosine-3'-phosphate
  modified_base 13: mod_base = OTHER; note = uridine-3'-phosphate
  modified_base 14: mod_base = OTHER; note = uridine-3'-phosphate
  modified_base 15: mod_base = OTHER; note = cytidine-3'-phosphate
  modified_base 16: mod_base = OTHER; note = guanosine-3'-phosphate
  modified_base 17: mod_base = OTHER; note = cytidine-3'-phosphate
  modified_base 18: mod_base = OTHER; note = adenosine-3'-phosphate
  modified_base 19: mod_base = OTHER; note = cytidine-3'-phosphate
  misc_feature 1..19: note = RNA
  misc_feature 20..21: note = DNA
gcagggtacacattcgcactt

SEQ ID NO: 1054 - DNA, 21 bp, synthetic construct
  source 1..21: mol_type = other DNA
  modified_base 1: mod_base = OTHER; note = guanosine-3'-phosphate
  modified_base 2: mod_base = OTHER; note = uridine-3'-phosphate
  modified_base 3: mod_base = OTHER; note = guanosine-3'-phosphate
  modified_base 4: mod_base = OTHER; note = cytidine-3'-phosphate
  modified_base 5: mod_base = OTHER; note = guanosine-3'-phosphate
  modified_base 6: mod_base = OTHER; note = adenosine-3'-phosphate
  modified_base 7: mod_base = OTHER; note = adenosine-3'-phosphate
  modified_base 8: mod_base = OTHER; note = uridine-3'-phosphate
  modified_base 9: mod_base = OTHER; note = guanosine-3'-phosphate
  modified_base 10: mod_base = OTHER; note = uridine-3'-phosphate
  modified_base 11: mod_base = OTHER; note = guanosine-3'-phosphate
  modified_base 12: mod_base = OTHER; note = uridine-3'-phosphate
  modified_base 13: mod_base = OTHER; note = adenosine-3'-phosphate
  modified_base 14: mod_base = OTHER; note = cytidine-3'-phosphate
  modified_base 15: mod_base = OTHER; note = cytidine-3'-phosphate
  modified_base 16: mod_base = OTHER; note = cytidine-3'-phosphate
  modified_base 17: mod_base = OTHER; note = uridine-3'-phosphate
  modified_base 18: mod_base = OTHER; note = guanosine-3'-phosphate
  modified_base 19: mod_base = OTHER; note = cytidine-3'-phosphate
  misc_feature 1..19: note = RNA
  misc_feature 20..21: note = DNA
gtgcgaatgtgtaccctgctt

SEQ ID NO: 1055 - DNA, 21 bp, synthetic construct
  source 1..21: mol_type = other DNA
  modified_base 1: mod_base = OTHER; note = cytidine-3'-phosphate
  modified_base 2: mod_base = OTHER; note = adenosine-3'-phosphate
  modified_base 3: mod_base = OTHER; note = guanosine-3'-phosphate
  modified_base 4: mod_base = OTHER; note = guanosine-3'-phosphate
  modified_base 5: mod_base = OTHER; note = guanosine-3'-phosphate
  modified_base 6: mod_base = OTHER; note = uridine-3'-phosphate
  modified_base 7: mod_base = OTHER; note = adenosine-3'-phosphate
  modified_base 8: mod_base = OTHER; note = cytidine-3'-phosphate
  modified_base 9: mod_base = OTHER; note = adenosine-3'-phosphate
  modified_base 10: mod_base = OTHER; note = cytidine-3'-phosphate
  modified_base 11: mod_base = OTHER; note = adenosine-3'-phosphate
  modified_base 12: mod_base = OTHER; note = uridine-3'-phosphate
  modified_base 13: mod_base = OTHER; note = uridine-3'-phosphate
  modified_base 14: mod_base = OTHER; note = cytidine-3'-phosphate
  modified_base 15: mod_base = OTHER; note = guanosine-3'-phosphate
  modified_base 16: mod_base = OTHER; note = cytidine-3'-phosphate
  modified_base 17: mod_base = OTHER; note = adenosine-3'-phosphate
  modified_base 18: mod_base = OTHER; note = cytidine-3'-phosphate
  modified_base 19: mod_base = OTHER; note = cytidine-3'-phosphate
  misc_feature 1..19: note = RNA
  misc_feature 20..21: note = DNA
cagggtacacattcgcacctt

SEQ ID NO: 1056 - DNA, 21 bp, synthetic construct
  source 1..21: mol_type = other DNA
  modified_base 1: mod_base = OTHER; note = guanosine-3'-phosphate
  modified_base 2: mod_base = OTHER; note = guanosine-3'-phosphate
  modified_base 3: mod_base = OTHER; note = uridine-3'-phosphate
  modified_base 4: mod_base = OTHER; note = guanosine-3'-phosphate
  modified_base 5: mod_base = OTHER; note = cytidine-3'-phosphate
  modified_base 6: mod_base = OTHER; note = guanosine-3'-phosphate
  modified_base 7: mod_base = OTHER; note = adenosine-3'-phosphate
  modified_base 8: mod_base = OTHER; note = adenosine-3'-phosphate
  modified_base 9: mod_base = OTHER; note = uridine-3'-phosphate
  modified_base 10: mod_base = OTHER; note = guanosine-3'-phosphate
  modified_base 11: mod_base = OTHER; note = uridine-3'-phosphate
  modified_base 12: mod_base = OTHER; note = guanosine-3'-phosphate
  modified_base 13: mod_base = OTHER; note = uridine-3'-phosphate
  modified_base 14: mod_base = OTHER; note = adenosine-3'-phosphate
  modified_base 15: mod_base = OTHER; note = cytidine-3'-phosphate
  modified_base 16: mod_base = OTHER; note = cytidine-3'-phosphate
  modified_base 17: mod_base = OTHER; note = cytidine-3'-phosphate
  modified_base 18: mod_base = OTHER; note = uridine-3'-phosphate
  modified_base 19: mod_base = OTHER; note = guanosine-3'-phosphate
  misc_feature 1..19: note = RNA
  misc_feature 20..21: note = DNA
ggtgcgaatgtgtaccctgtt

SEQ ID NO: 1057 - DNA, 21 bp, synthetic construct
  source 1..21: mol_type = other DNA
  modified_base 1: mod_base = OTHER; note = adenosine-3'-phosphate
  modified_base 2: mod_base = OTHER; note = guanosine-3'-phosphate
  modified_base 3: mod_base = OTHER; note = guanosine-3'-phosphate
  modified_base 4: mod_base = OTHER; note = guanosine-3'-phosphate
  modified_base 5: mod_base = OTHER; note = uridine-3'-phosphate
  modified_base 6: mod_base = OTHER; note = adenosine-3'-phosphate
  modified_base 7: mod_base = OTHER; note = cytidine-3'-phosphate
  modified_base 8: mod_base = OTHER; note = adenosine-3'-phosphate
  modified_base 9: mod_base = OTHER; note = cytidine-3'-phosphate
  modified_base 10: mod_base = OTHER; note = adenosine-3'-phosphate
  modified_base 11: mod_base = OTHER; note = uridine-3'-phosphate
  modified_base 12: mod_base = OTHER; note = uridine-3'-phosphate
  modified_base 13: mod_base = OTHER; note = cytidine-3'-phosphate
  modified_base 14: mod_base = OTHER; note = guanosine-3'-phosphate
  modified_base 15: mod_base = OTHER; note = cytidine-3'-phosphate
  modified_base 16: mod_base = OTHER; note = adenosine-3'-phosphate
  modified_base 17: mod_base = OTHER; note = cytidine-3'-phosphate
  modified_base 18: mod_base = OTHER; note = cytidine-3'-phosphate
  modified_base 19: mod_base = OTHER; note = cytidine-3'-phosphate
  misc_feature 1..19: note = RNA
  misc_feature 20..21: note = DNA
agggtacacattcgcaccctt

SEQ ID NO: 1058 - DNA, 21 bp, synthetic construct
  source 1..21: mol_type = other DNA
  modified_base 1: mod_base = OTHER; note = guanosine-3'-phosphate
  modified_base 2: mod_base = OTHER; note = guanosine-3'-phosphate
  modified_base 3: mod_base = OTHER; note = guanosine-3'-phosphate
  modified_base 4: mod_base = OTHER; note = uridine-3'-phosphate
  modified_base 5: mod_base = OTHER; note = guanosine-3'-phosphate
  modified_base 6: mod_base = OTHER; note = cytidine-3'-phosphate
  modified_base 7: mod_base = OTHER; note = guanosine-3'-phosphate
  modified_base 8: mod_base = OTHER; note = adenosine-3'-phosphate
  modified_base 9: mod_base = OTHER; note = adenosine-3'-phosphate
  modified_base 10: mod_base = OTHER; note = uridine-3'-phosphate
  modified_base 11: mod_base = OTHER; note = guanosine-3'-phosphate
  modified_base 12: mod_base = OTHER; note = uridine-3'-phosphate
  modified_base 13: mod_base = OTHER; note = guanosine-3'-phosphate
  modified_base 14: mod_base = OTHER; note = uridine-3'-phosphate
  modified_base 15: mod_base = OTHER; note = adenosine-3'-phosphate
  modified_base 16: mod_base = OTHER; note = cytidine-3'-phosphate
  modified_base 17: mod_base = OTHER; note = cytidine-3'-phosphate
  modified_base 18: mod_base = OTHER; note = cytidine-3'-phosphate
  modified_base 19: mod_base = OTHER; note = uridine-3'-phosphate
  misc_feature 1..19: note = RNA
  misc_feature 20..21: note = DNA
gggtgcgaatgtgtacccttt

SEQ ID NO: 1059 - DNA, 21 bp, synthetic construct
  source 1..21: mol_type = other DNA
  modified_base 1: mod_base = OTHER; note = guanosine-3'-phosphate
  modified_base 2: mod_base = OTHER; note = guanosine-3'-phosphate
  modified_base 3: mod_base = OTHER; note = adenosine-3'-phosphate
  modified_base 4: mod_base = OTHER; note = adenosine-3'-phosphate
  modified_base 5: mod_base = OTHER; note = cytidine-3'-phosphate
  modified_base 6: mod_base = OTHER; note = uridine-3'-phosphate
  modified_base 7: mod_base = OTHER; note = guanosine-3'-phosphate
  modified_base 8: mod_base = OTHER; note = adenosine-3'-phosphate
  modified_base 9: mod_base = OTHER; note = guanosine-3'-phosphate
  modified_base 10: mod_base = OTHER; note = cytidine-3'-phosphate
  modified_base 11: mod_base = OTHER; note = cytidine-3'-phosphate
  modified_base 12: mod_base = OTHER; note = adenosine-3'-phosphate
  modified_base 13: mod_base = OTHER; note = guanosine-3'-phosphate
  modified_base 14: mod_base = OTHER; note = adenosine-3'-phosphate
  modified_base 15: mod_base = OTHER; note = adenosine-3'-phosphate
  modified_base 16: mod_base = OTHER; note = adenosine-3'-phosphate
  modified_base 17: mod_base = OTHER; note = cytidine-3'-phosphate
  modified_base 18: mod_base = OTHER; note = guanosine-3'-phosphate
  modified_base 19: mod_base = OTHER; note = cytidine-3'-phosphate
  misc_feature 1..19: note = RNA
  misc_feature 20..21: note = DNA
ggaactgagccagaaacgctt

SEQ ID NO: 1060 - DNA, 21 bp, synthetic construct
  source 1..21: mol_type = other DNA
  modified_base 1: mod_base = OTHER; note = guanosine-3'-phosphate
  modified_base 2: mod_base = OTHER; note = cytidine-3'-phosphate
  modified_base 3: mod_base = OTHER; note = guanosine-3'-phosphate
  modified_base 4: mod_base = OTHER; note = uridine-3'-phosphate
  modified_base 5: mod_base = OTHER; note = uridine-3'-phosphate
  modified_base 6: mod_base = OTHER; note = uridine-3'-phosphate
  modified_base 7: mod_base = OTHER; note = cytidine-3'-phosphate
  modified_base 8: mod_base = OTHER; note = uridine-3'-phosphate
  modified_base 9: mod_base = OTHER; note = guanosine-3'-phosphate
  modified_base 10: mod_base = OTHER; note = guanosine-3'-phosphate
  modified_base 11: mod_base = OTHER; note = cytidine-3'-phosphate
  modified_base 12: mod_base = OTHER; note = uridine-3'-phosphate
  modified_base 13: mod_base = OTHER; note = cytidine-3'-phosphate
  modified_base 14: mod_base = OTHER; note = adenosine-3'-phosphate
  modified_base 15: mod_base = OTHER; note = guanosine-3'-phosphate
  modified_base 16: mod_base = OTHER; note = uridine-3'-phosphate
  modified_base 17: mod_base = OTHER; note = uridine-3'-phosphate
  modified_base 18: mod_base = OTHER; note = cytidine-3'-phosphate
  modified_base 19: mod_base = OTHER; note = cytidine-3'-phosphate
  misc_feature 1..19: note = RNA
  misc_feature 20..21: note = DNA
gcgtttctggctcagttcctt

SEQ ID NO: 1061 - DNA, 21 bp, synthetic construct
  source 1..21: mol_type = other DNA
  modified_base 1: mod_base = OTHER; note = guanosine-3'-phosphate
  modified_base 2: mod_base = OTHER; note = adenosine-3'-phosphate
  modified_base 3: mod_base = OTHER; note = adenosine-3'-phosphate
  modified_base 4: mod_base = OTHER; note = cytidine-3'-phosphate
  modified_base 5: mod_base = OTHER; note = uridine-3'-phosphate
  modified_base 6: mod_base = OTHER; note = guanosine-3'-phosphate
  modified_base 7: mod_base = OTHER; note = adenosine-3'-phosphate
  modified_base 8: mod_base = OTHER; note = guanosine-3'-phosphate
  modified_base 9: mod_base = OTHER; note = cytidine-3'-phosphate
  modified_base 10: mod_base = OTHER; note = cytidine-3'-phosphate
  modified_base 11: mod_base = OTHER; note = adenosine-3'-phosphate
  modified_base 12: mod_base = OTHER; note = guanosine-3'-phosphate
  modified_base 13: mod_base = OTHER; note = adenosine-3'-phosphate
  modified_base 14: mod_base = OTHER; note = adenosine-3'-phosphate
  modified_base 15: mod_base = OTHER; note = adenosine-3'-phosphate
  modified_base 16: mod_base = OTHER; note = cytidine-3'-phosphate
  modified_base 17: mod_base = OTHER; note = guanosine-3'-phosphate
  modified_base 18: mod_base = OTHER; note = cytidine-3'-phosphate
  modified_base 19: mod_base = OTHER; note = adenosine-3'-phosphate
  misc_feature 1..19: note = RNA
  misc_feature 20..21: note = DNA
gaactgagccagaaacgcatt

SEQ ID NO: 1062 - DNA, 21 bp, synthetic construct
  source 1..21: mol_type = other DNA
  modified_base 1: mod_base = OTHER; note = uridine-3'-phosphate
  modified_base 2: mod_base = OTHER; note = guanosine-3'-phosphate
  modified_base 3: mod_base = OTHER; note = cytidine-3'-phosphate
  modified_base 4: mod_base = OTHER; note = guanosine-3'-phosphate
  modified_base 5: mod_base = OTHER; note = uridine-3'-phosphate
  modified_base 6: mod_base = OTHER; note = uridine-3'-phosphate
  modified_base 7: mod_base = OTHER; note = uridine-3'-phosphate
  modified_base 8: mod_base = OTHER; note = cytidine-3'-phosphate
  modified_base 9: mod_base = OTHER; note = uridine-3'-phosphate
  modified_base 10: mod_base = OTHER; note = guanosine-3'-phosphate
  modified_base 11: mod_base = OTHER; note = guanosine-3'-phosphate
  modified_base 12: mod_base = OTHER; note = cytidine-3'-phosphate
  modified_base 13: mod_base = OTHER; note = uridine-3'-phosphate
  modified_base 14: mod_base = OTHER; note = cytidine-3'-phosphate
  modified_base 15: mod_base = OTHER; note = adenosine-3'-phosphate
  modified_base 16: mod_base = OTHER; note = guanosine-3'-phosphate
  modified_base 17: mod_base = OTHER; note = uridine-3'-phosphate
  modified_base 18: mod_base = OTHER; note = uridine-3'-phosphate
  modified_base 19: mod_base = OTHER; note = cytidine-3'-phosphate
  misc_feature 1..19: note = RNA
  misc_feature 20..21: note = DNA
tgcgtttctggctcagttctt

SEQ ID NO: 1063 - DNA, 21 bp, synthetic construct
  source 1..21: mol_type = other DNA
  modified_base 1: mod_base = OTHER; note = adenosine-3'-phosphate
  modified_base 2: mod_base = OTHER; note = adenosine-3'-phosphate
  modified_base 3: mod_base = OTHER; note = cytidine-3'-phosphate
  modified_base 4: mod_base = OTHER; note = uridine-3'-phosphate
  modified_base 5: mod_base = OTHER; note = guanosine-3'-phosphate
  modified_base 6: mod_base = OTHER; note = adenosine-3'-phosphate
  modified_base 7: mod_base = OTHER; note = guanosine-3'-phosphate
  modified_base 8: mod_base = OTHER; note = cytidine-3'-phosphate
  modified_base 9: mod_base = OTHER; note = cytidine-3'-phosphate
  modified_base 10: mod_base = OTHER; note = adenosine-3'-phosphate
  modified_base 11: mod_base = OTHER; note = guanosine-3'-phosphate
  modified_base 12: mod_base = OTHER; note = adenosine-3'-phosphate
  modified_base 13: mod_base = OTHER; note = adenosine-3'-phosphate
  modified_base 14: mod_base = OTHER; note = adenosine-3'-phosphate
  modified_base 15: mod_base = OTHER; note = cytidine-3'-phosphate
  modified_base 16: mod_base = OTHER; note = guanosine-3'-phosphate
  modified_base 17: mod_base = OTHER; note = cytidine-3'-phosphate
  modified_base 18: mod_base = OTHER; note = adenosine-3'-phosphate
  modified_base 19: mod_base = OTHER; note = guanosine-3'-phosphate
  misc_feature 1..19: note = RNA
  misc_feature 20..21: note = DNA
aactgagccagaaacgcagtt

SEQ ID NO: 1064 - DNA, 21 bp, synthetic construct
  source 1..21: mol_type = other DNA
  modified_base 1: mod_base = OTHER; note = cytidine-3'-phosphate
  modified_base 2: mod_base = OTHER; note = uridine-3'-phosphate
  modified_base 3: mod_base = OTHER; note = guanosine-3'-phosphate
  modified_base 4: mod_base = OTHER; note = cytidine-3'-phosphate
  modified_base 5: mod_base = OTHER; note = guanosine-3'-phosphate
  modified_base 6: mod_base = OTHER; note = uridine-3'-phosphate
  modified_base 7: mod_base = OTHER; note = uridine-3'-phosphate
  modified_base 8: mod_base = OTHER; note = uridine-3'-phosphate
  modified_base 9: mod_base = OTHER; note = cytidine-3'-phosphate
  modified_base 10: mod_base = OTHER; note = uridine-3'-phosphate
  modified_base 11: mod_base = OTHER; note = guanosine-3'-phosphate
  modified_base 12: mod_base = OTHER; note = guanosine-3'-phosphate
  modified_base 13: mod_base = OTHER; note = cytidine-3'-phosphate
  modified_base 14: mod_base = OTHER; note = uridine-3'-phosphate
  modified_base 15: mod_base = OTHER; note = cytidine-3'-phosphate
  modified_base 16: mod_base = OTHER; note = adenosine-3'-phosphate
  modified_base 17: mod_base = OTHER; note = guanosine-3'-phosphate
  modified_base 18: mod_base = OTHER; note = uridine-3'-phosphate
  modified_base 19: mod_base = OTHER; note = uridine-3'-phosphate
  misc_feature 1..19: note = RNA
  misc_feature 20..21: note = DNA
ctgcgtttctggctcagtttt

SEQ ID NO: 1065 - DNA, 21 bp, synthetic construct
  source 1..21: mol_type = other DNA
  modified_base 1: mod_base = OTHER; note = uridine-3'-phosphate
  modified_base 2: mod_base = OTHER; note = guanosine-3'-phosphate
  modified_base 3: mod_base = OTHER; note = adenosine-3'-phosphate
  modified_base 4: mod_base = OTHER; note = guanosine-3'-phosphate
  modified_base 5: mod_base = OTHER; note = cytidine-3'-phosphate
  modified_base 6: mod_base = OTHER; note = cytidine-3'-phosphate
  modified_base 7: mod_base = OTHER; note = adenosine-3'-phosphate
  modified_base 8: mod_base = OTHER; note = guanosine-3'-phosphate
  modified_base 9: mod_base = OTHER; note = adenosine-3'-phosphate
  modified_base 10: mod_base = OTHER; note = adenosine-3'-phosphate
  modified_base 11: mod_base = OTHER; note = adenosine-3'-phosphate
  modified_base 12: mod_base = OTHER; note = cytidine-3'-phosphate
  modified_base 13: mod_base = OTHER; note = guanosine-3'-phosphate
  modified_base 14: mod_base = OTHER; note = cytidine-3'-phosphate
  modified_base 15: mod_base = OTHER; note = adenosine-3'-phosphate
  modified_base 16: mod_base = OTHER; note = guanosine-3'-phosphate
  modified_base 17: mod_base = OTHER; note = adenosine-3'-phosphate
  modified_base 18: mod_base = OTHER; note = uridine-3'-phosphate
  modified_base 19: mod_base = OTHER; note = uridine-3'-phosphate
  misc_feature 1..19: note = RNA
  misc_feature 20..21: note = DNA
tgagccagaaacgcagatttt

SEQ ID NO: 1066 - DNA, 21 bp, synthetic construct
  source 1..21: mol_type = other DNA
  modified_base 1: mod_base = OTHER; note = adenosine-3'-phosphate
  modified_base 2: mod_base = OTHER; note = adenosine-3'-phosphate
  modified_base 3: mod_base = OTHER; note = uridine-3'-phosphate
  modified_base 4: mod_base = OTHER; note = cytidine-3'-phosphate
  modified_base 5: mod_base = OTHER; note = uridine-3'-phosphate
  modified_base 6: mod_base = OTHER; note = guanosine-3'-phosphate
  modified_base 7: mod_base = OTHER; note = cytidine-3'-phosphate
  modified_base 8: mod_base = OTHER; note = guanosine-3'-phosphate
  modified_base 9: mod_base = OTHER; note = uridine-3'-phosphate
  modified_base 10: mod_base = OTHER; note = uridine-3'-phosphate
  modified_base 11: mod_base = OTHER; note = uridine-3'-phosphate
  modified_base 12: mod_base = OTHER; note = cytidine-3'-phosphate
  modified_base 13: mod_base = OTHER; note = uridine-3'-phosphate
  modified_base 14: mod_base = OTHER; note = guanosine-3'-phosphate
  modified_base 15: mod_base = OTHER; note = guanosine-3'-phosphate
  modified_base 16: mod_base = OTHER; note = cytidine-3'-phosphate
  modified_base 17: mod_base = OTHER; note = uridine-3'-phosphate
  modified_base 18: mod_base = OTHER; note = cytidine-3'-phosphate
  modified_base 19: mod_base = OTHER; note = adenosine-3'-phosphate
  misc_feature 1..19: note = RNA
  misc_feature 20..21: note = DNA
aatctgcgtttctggctcatt

SEQ ID NO: 1067 - DNA, 21 bp, synthetic construct
  source 1..21: mol_type = other DNA
  modified_base 1: mod_base = OTHER; note = adenosine-3'-phosphate
  modified_base 2: mod_base = OTHER; note = guanosine-3'-phosphate
  modified_base 3: mod_base = OTHER; note = adenosine-3'-phosphate
  modified_base 4: mod_base = OTHER; note = adenosine-3'-phosphate
  modified_base 5: mod_base = OTHER; note = adenosine-3'-phosphate
  modified_base 6: mod_base = OTHER; note = cytidine-3'-phosphate
  modified_base 7: mod_base = OTHER; note = guanosine-3'-phosphate
  modified_base 8: mod_base = OTHER; note = cytidine-3'-phosphate
  modified_base 9: mod_base = OTHER; note = adenosine-3'-phosphate
  modified_base 10: mod_base = OTHER; note = guanosine-3'-phosphate
  modified_base 11: mod_base = OTHER; note = adenosine-3'-phosphate
  modified_base 12: mod_base = OTHER; note = uridine-3'-phosphate
  modified_base 13: mod_base = OTHER; note = uridine-3'-phosphate
  modified_base 14: mod_base = OTHER; note = guanosine-3'-phosphate
  modified_base 15: mod_base = OTHER; note = guanosine-3'-phosphate
  modified_base 16: mod_base = OTHER; note = guanosine-3'-phosphate
  modified_base 17: mod_base = OTHER; note = cytidine-3'-phosphate
  modified_base 18: mod_base = OTHER; note = uridine-3'-phosphate
  modified_base 19: mod_base = OTHER; note = guanosine-3'-phosphate
  misc_feature 1..19: note = RNA
  misc_feature 20..21: note = DNA
agaaacgcagattgggctgtt

SEQ ID NO: 1068 - DNA, 21 bp, synthetic construct
  source 1..21: mol_type = other DNA
  modified_base 1: mod_base = OTHER; note = cytidine-3'-phosphate
  modified_base 2: mod_base = OTHER; note = adenosine-3'-phosphate
  modified_base 3: mod_base = OTHER; note = guanosine-3'-phosphate
  modified_base 4: mod_base = OTHER; note = cytidine-3'-phosphate
  modified_base 5: mod_base = OTHER; note = cytidine-3'-phosphate
  modified_base 6: mod_base = OTHER; note = cytidine-3'-phosphate
  modified_base 7: mod_base = OTHER; note = adenosine-3'-phosphate
  modified_base 8: mod_base = OTHER; note = adenosine-3'-phosphate
  modified_base 9: mod_base = OTHER; note = uridine-3'-phosphate
  modified_base 10: mod_base = OTHER; note = cytidine-3'-phosphate
  modified_base 11: mod_base = OTHER; note = uridine-3'-phosphate
  modified_base 12: mod_base = OTHER; note = guanosine-3'-phosphate
  modified_base 13: mod_base = OTHER; note = cytidine-3'-phosphate
  modified_base 14: mod_base = OTHER; note = guanosine-3'-phosphate
  modified_base 15: mod_base = OTHER; note = uridine-3'-phosphate
  modified_base 16: mod_base = OTHER; note = uridine-3'-phosphate
  modified_base 17: mod_base = OTHER; note = uridine-3'-phosphate
  modified_base 18: mod_base = OTHER; note = cytidine-3'-phosphate
  modified_base 19: mod_base = OTHER; note = uridine-3'-phosphate
  misc_feature 1..19: note = RNA
  misc_feature 20..21: note = DNA
cagcccaatctgcgtttcttt

SEQ ID NO: 1069 - DNA, 21 bp, synthetic construct
  source 1..21: mol_type = other DNA
  modified_base 1: mod_base = OTHER; note = adenosine-3'-phosphate
  modified_base 2: mod_base = OTHER; note = adenosine-3'-phosphate
  modified_base 3: mod_base = OTHER; note = cytidine-3'-phosphate
  modified_base 4: mod_base = OTHER; note = guanosine-3'-phosphate
  modified_base 5: mod_base = OTHER; note = cytidine-3'-phosphate
  modified_base 6: mod_base = OTHER; note = adenosine-3'-phosphate
  modified_base 7: mod_base = OTHER; note = guanosine-3'-phosphate
  modified_base 8: mod_base = OTHER; note = adenosine-3'-phosphate
  modified_base 9: mod_base = OTHER; note = uridine-3'-phosphate
  modified_base 10: mod_base = OTHER; note = uridine-3'-phosphate
  modified_base 11: mod_base = OTHER; note = guanosine-3'-phosphate
  modified_base 12: mod_base = OTHER; note = guanosine-3'-phosphate
  modified_base 13: mod_base = OTHER; note = guanosine-3'-phosphate
  modified_base 14: mod_base = OTHER; note = cytidine-3'-phosphate
  modified_base 15: mod_base = OTHER; note = uridine-3'-phosphate
  modified_base 16: mod_base = OTHER; note = guanosine-3'-phosphate
  modified_base 17: mod_base = OTHER; note = guanosine-3'-phosphate
  modified_base 18: mod_base = OTHER; note = cytidine-3'-phosphate
  modified_base 19: mod_base = OTHER; note = uridine-3'-phosphate
  misc_feature 1..19: note = RNA
  misc_feature 20..21: note = DNA
aacgcagattgggctggcttt

SEQ ID NO: 1070 - DNA, 21 bp, synthetic construct
  source 1..21: mol_type = other DNA
  modified_base 1: mod_base = OTHER; note = adenosine-3'-phosphate
  modified_base 2: mod_base = OTHER; note = guanosine-3'-phosphate
  modified_base 3: mod_base = OTHER; note = cytidine-3'-phosphate
  modified_base 4: mod_base = OTHER; note = cytidine-3'-phosphate
  modified_base 5: mod_base = OTHER; note = adenosine-3'-phosphate
  modified_base 6: mod_base = OTHER; note = guanosine-3'-phosphate
  modified_base 7: mod_base = OTHER; note = cytidine-3'-phosphate
  modified_base 8: mod_base = OTHER; note = cytidine-3'-phosphate
  modified_base 9: mod_base = OTHER; note = cytidine-3'-phosphate
  modified_base 10: mod_base = OTHER; note = adenosine-3'-phosphate
  modified_base 11: mod_base = OTHER; note = adenosine-3'-phosphate
  modified_base 12: mod_base = OTHER; note = uridine-3'-phosphate
  modified_base 13: mod_base = OTHER; note = cytidine-3'-phosphate
  modified_base 14: mod_base = OTHER; note = uridine-3'-phosphate
  modified_base 15: mod_base = OTHER; note = guanosine-3'-phosphate
  modified_base 16: mod_base = OTHER; note = cytidine-3'-phosphate
  modified_base 17: mod_base = OTHER; note = guanosine-3'-phosphate
  modified_base 18: mod_base = OTHER; note = uridine-3'-phosphate
  modified_base 19: mod_base = OTHER; note = uridine-3'-phosphate
  misc_feature 1..19: note = RNA
  misc_feature 20..21: note = DNA
agccagcccaatctgcgtttt

SEQ ID NO: 1071 - DNA, 21 bp, synthetic construct
  source 1..21: mol_type = other DNA
  modified_base 1: mod_base = OTHER; note = adenosine-3'-phosphate
  modified_base 2: mod_base = OTHER; note = guanosine-3'-phosphate
  modified_base 3: mod_base = OTHER; note = cytidine-3'-phosphate
  modified_base 4: mod_base = OTHER; note = cytidine-3'-phosphate
  modified_base 5: mod_base = OTHER; note = adenosine-3'-phosphate
  modified_base 6: mod_base = OTHER; note = adenosine-3'-phosphate
  modified_base 7: mod_base = OTHER; note = guanosine-3'-phosphate
  modified_base 8: mod_base = OTHER; note = cytidine-3'-phosphate
  modified_base 9: mod_base = OTHER; note = cytidine-3'-phosphate
  modified_base 10: mod_base = OTHER; note = uridine-3'-phosphate
  modified_base 11: mod_base = OTHER; note = cytidine-3'-phosphate
  modified_base 12: mod_base = OTHER; note = uridine-3'-phosphate
  modified_base 13: mod_base = OTHER; note = uridine-3'-phosphate
  modified_base 14: mod_base = OTHER; note = cytidine-3'-phosphate
  modified_base 15: mod_base = OTHER; note = uridine-3'-phosphate
  modified_base 16: mod_base = OTHER; note = uridine-3'-phosphate
  modified_base 17: mod_base = OTHER; note = adenosine-3'-phosphate
  modified_base 18: mod_base = OTHER; note = cytidine-3'-phosphate
  modified_base 19: mod_base = OTHER; note = uridine-3'-phosphate
  modified_base 20: mod_base = OTHER; note = 2'-deoxythymidine-3'-phosphorothioate
  misc_feature 1..19: note = RNA
  misc_feature 20..21: note = DNA
agccaagcctcttcttacttt

SEQ ID NO: 1072 - DNA, 21 bp, synthetic construct
  source 1..21: mol_type = other DNA
  modified_base 1: mod_base = OTHER; note = adenosine-3'-phosphate
  modified_base 2: mod_base = OTHER; note = guanosine-3'-phosphate
  modified_base 3: mod_base = OTHER; note = uridine-3'-phosphate
  modified_base 4: mod_base = OTHER; note = adenosine-3'-phosphate
  modified_base 5: mod_base = OTHER; note = adenosine-3'-phosphate
  modified_base 6: mod_base = OTHER; note = guanosine-3'-phosphate
  modified_base 7: mod_base = OTHER; note = adenosine-3'-phosphate
  modified_base 8: mod_base = OTHER; note = adenosine-3'-phosphate
  modified_base 9: mod_base = OTHER; note = guanosine-3'-phosphate
  modified_base 10: mod_base = OTHER; note = adenosine-3'-phosphate
  modified_base 11: mod_base = OTHER; note = guanosine-3'-phosphate
  modified_base 12: mod_base = OTHER; note = guanosine-3'-phosphate
  modified_base 13: mod_base = OTHER; note = cytidine-3'-phosphate
  modified_base 14: mod_base = OTHER; note = uridine-3'-phosphate
  modified_base 15: mod_base = OTHER; note = uridine-3'-phosphate
  modified_base 16: mod_base = OTHER; note = guanosine-3'-phosphate
  modified_base 17: mod_base = OTHER; note = guanosine-3'-phosphate
  modified_base 18: mod_base = OTHER; note = cytidine-3'-phosphate
  modified_base 19: mod_base = OTHER; note = uridine-3'-phosphate
  modified_base 20: mod_base = OTHER; note = 2'-deoxythymidine-3'-phosphorothioate
  misc_feature 1..19: note = RNA
  misc_feature 20..21: note = DNA
agtaagaagaggcttggcttt

SEQ ID NO: 1073 - DNA, 21 bp, synthetic construct
  source 1..21: mol_type = other DNA
  modified_base 1: mod_base = OTHER; note = adenosine-3'-phosphate
  modified_base 2: mod_base = OTHER; note = guanosine-3'-phosphate
  modified_base 3: mod_base = OTHER; note = 2'-O-methylcytidine-3'-phosphate
  modified_base 4: mod_base = OTHER; note = 2'-O-methylcytidine-3'-phosphate
  modified_base 5: mod_base = OTHER; note = adenosine-3'-phosphate
  modified_base 6: mod_base = OTHER; note = adenosine-3'-phosphate
  modified_base 7: mod_base = OTHER; note = guanosine-3'-phosphate
  modified_base 8: mod_base = OTHER; note = 2'-O-methylcytidine-3'-phosphate
  modified_base 9: mod_base = OTHER; note = 2'-O-methylcytidine-3'-phosphate
  modified_base 10: mod_base = OTHER; note = 2'-O-methyluridine-3'-phosphate
  modified_base 11: mod_base = OTHER; note = 2'-O-methylcytidine-3'-phosphate
  modified_base 12: mod_base = OTHER; note = 2'-O-methyluridine-3'-phosphate
  modified_base 13: mod_base = OTHER; note = 2'-O-methyluridine-3'-phosphate
  modified_base 14: mod_base = OTHER; note = 2'-O-methylcytidine-3'-phosphate
  modified_base 15: mod_base = OTHER; note = 2'-O-methyluridine-3'-phosphate
  modified_base 16: mod_base = OTHER; note = 2'-O-methyluridine-3'-phosphate
  modified_base 17: mod_base = OTHER; note = adenosine-3'-phosphate
  modified_base 18: mod_base = OTHER; note = 2'-O-methylcytidine-3'-phosphate
  modified_base 19: mod_base = OTHER; note = 2'-O-methyluridine-3'-phosphate
  modified_base 20: mod_base = OTHER; note = 2'-deoxythymidine-3'-phosphorothioate
  misc_feature 1..19: note = RNA
  misc_feature 20..21: note = DNA
agccaagcctcttcttacttt

SEQ ID NO: 1074 - DNA, 21 bp, synthetic construct
  source 1..21: mol_type = other DNA
  modified_base 1: mod_base = OTHER; note = adenosine-3'-phosphate
  modified_base 2: mod_base = OTHER; note = guanosine-3'-phosphate
  modified_base 3: mod_base = OTHER; note = 2'-O-methyluridine-3'-phosphate
  modified_base 4: mod_base = OTHER; note = adenosine-3'-phosphate
  modified_base 5: mod_base = OTHER; note = adenosine-3'-phosphate
  modified_base 6: mod_base = OTHER; note = guanosine-3'-phosphate
  modified_base 7: mod_base = OTHER; note = adenosine-3'-phosphate
  modified_base 8: mod_base = OTHER; note = adenosine-3'-phosphate
  modified_base 9: mod_base = OTHER; note = guanosine-3'-phosphate
  modified_base 10: mod_base = OTHER; note = adenosine-3'-phosphate
  modified_base 11: mod_base = OTHER; note = guanosine-3'-phosphate
  modified_base 12: mod_base = OTHER; note = guanosine-3'-phosphate
  modified_base 13: mod_base = OTHER; note = cytidine-3'-phosphate
  modified_base 14: mod_base = OTHER; note = uridine-3'-phosphate
  modified_base 15: mod_base = OTHER; note = uridine-3'-phosphate
  modified_base 16: mod_base = OTHER; note = guanosine-3'-phosphate
  modified_base 17: mod_base = OTHER; note = guanosine-3'-phosphate
  modified_base 18: mod_base = OTHER; note = cytidine-3'-phosphate
  modified_base 19: mod_base = OTHER; note = uridine-3'-phosphate
  modified_base 20: mod_base = OTHER; note = 2'-deoxythymidine-3'-phosphorothioate
  misc_feature 1..19: note = RNA
  misc_feature 20..21: note = DNA
agtaagaagaggcttggcttt

SEQ ID NO: 1075 - DNA, 21 bp, synthetic construct
  source 1..21: mol_type = other DNA
  modified_base 1: mod_base = OTHER; note = 2'-deoxy-2'-fluoroadenosine-3'-phosphate
  modified_base 2: mod_base = OTHER; note = 2'-O-methylguanosine-3'-phosphate
  modified_base 3: mod_base = OTHER; note = 2'-deoxy-2'-fluorocytidine-3'-phosphate
  modified_base 4: mod_base = OTHER; note = 2'-O-methylcytidine-3'-phosphate
  modified_base 5: mod_base = OTHER; note = 2'-deoxy-2'-fluoroadenosine-3'-phosphate
  modified_base 6: mod_base = OTHER; note = 2'-O-methyladenosine-3'-phosphate
  modified_base 7: mod_base = OTHER; note = 2'-deoxy-2'-fluoroguanosine-3'-phosphate
  modified_base 8: mod_base = OTHER; note = 2'-O-methylcytidine-3'-phosphate
  modified_base 9: mod_base = OTHER; note = 2'-deoxy-2'-fluorocytidine-3'-phosphate
  modified_base 10: mod_base = OTHER; note = 2'-O-methyluridine-3'-phosphate
  modified_base 11: mod_base = OTHER; note = 2'-deoxy-2'-fluorocytidine-3'-phosphate
  modified_base 12: mod_base = OTHER; note = 2'-O-methyluridine-3'-phosphate
  modified_base 13: mod_base = OTHER; note = 2'-deoxy-2'-fluorouridine-3'-phosphate
  modified_base 14: mod_base = OTHER; note = 2'-O-methylcytidine-3'-phosphate
  modified_base 15: mod_base = OTHER; note = 2'-deoxy-2'-fluorouridine-3'-phosphate
  modified_base 16: mod_base = OTHER; note = 2'-O-methyluridine-3'-phosphate
  modified_base 17: mod_base = OTHER; note = 2'-deoxy-2'-fluoroadenosine-3'-phosphate
  modified_base 18: mod_base = OTHER; note = 2'-O-methylcytidine-3'-phosphate
  modified_base 19: mod_base = OTHER; note = 2'-deoxy-2'-fluorouridine-3'-phosphate
  modified_base 20: mod_base = OTHER; note = 2'-deoxythymidine-3'-phosphorothioate
  misc_feature 1..19: note = RNA
  misc_feature 20..21: note = DNA
agccaagcctcttcttacttt

SEQ ID NO: 1076 - DNA, 21 bp, synthetic construct
  source 1..21: mol_type = other DNA
  modified_base 1: mod_base = OTHER; note = 2'-O-methyladenosine-3'-phosphate 5'phosphate
  modified_base 2: mod_base = OTHER; note = 2'-deoxy-2'-fluoroguanosine-3'-phosphate
  modified_base 3: mod_base = OTHER; note = 2'-O-methyluridine-3'-phosphate
  modified_base 4: mod_base = OTHER; note = 2'-deoxy-2'-fluoroadenosine-3'-phosphate
  modified_base 5: mod_base = OTHER; note = 2'-O-methyladenosine-3'-phosphate
  modified_base 6: mod_base = OTHER; note = 2'-deoxy-2'-fluoroguanosine-3'-phosphate
  modified_base 7: mod_base = OTHER; note = 2'-O-methyladenosine-3'-phosphate
  modified_base 8: mod_base = OTHER; note = 2'-deoxy-2'-fluoroadenosine-3'-phosphate
  modified_base 9: mod_base = OTHER; note = 2'-O-methylguanosine-3'-phosphate
  modified_base 10: mod_base = OTHER; note = 2'-deoxy-2'-fluoroadenosine-3'-phosphate
  modified_base 11: mod_base = OTHER; note = 2'-O-methylguanosine-3'-phosphate
  modified_base 12: mod_base = OTHER; note = 2'-deoxy-2'-fluoroguanosine-3'-phosphate
  modified_base 13: mod_base = OTHER; note = 2'-O-methylcytidine-3'-phosphate
  modified_base 14: mod_base = OTHER; note = 2'-deoxy-2'-fluorouridine-3'-phosphate
  modified_base 15: mod_base = OTHER; note = 2'-O-methyluridine-3'-phosphate
  modified_base 16: mod_base = OTHER; note = 2'-deoxy-2'-fluoroguanosine-3'-phosphate
  modified_base 17: mod_base = OTHER; note = 2'-O-methylguanosine-3'-phosphate
  modified_base 18: mod_base = OTHER; note = 2'-deoxy-2'-fluorocytidine-3'-phosphate
  modified_base 19: mod_base = OTHER; note = 2'-O-methyluridine-3'-phosphate
  modified_base 20: mod_base = OTHER; note = 2'-deoxythymidine-3'-phosphorothioate
  misc_feature 1..19: note = RNA
  misc_feature 20..21: note = DNA
agtaagaagaggcttggcttt

SEQ ID NO: 1077 - DNA, 21 bp, synthetic construct
  source 1..21: mol_type = other DNA
  modified_base 1: mod_base = OTHER; note = adenosine-3'-phosphate
  modified_base 2: mod_base = OTHER; note = guanosine-3'-phosphate
  modified_base 3: mod_base = OTHER; note = 2'-deoxy-2'-fluorocytidine-3'-phosphate
  modified_base 4: mod_base = OTHER; note = 2'-deoxy-2'-fluorocytidine-3'-phosphate
  modified_base 5: mod_base = OTHER; note = adenosine-3'-phosphate
  modified_base 6: mod_base = OTHER; note = adenosine-3'-phosphate
  modified_base 7: mod_base = OTHER; note = guanosine-3'-phosphate
  modified_base 8: mod_base = OTHER; note = 2'-deoxy-2'-fluorocytidine-3'-phosphate
  modified_base 9: mod_base = OTHER; note = 2'-deoxy-2'-fluorocytidine-3'-phosphate
  modified_base 10: mod_base = OTHER; note = 2'-deoxy-2'-fluorouridine-3'-phosphate
  modified_base 11: mod_base = OTHER; note = 2'-deoxy-2'-fluorocytidine-3'-phosphate
  modified_base 12: mod_base = OTHER; note = 2'-deoxy-2'-fluorouridine-3'-phosphate
  modified_base 13: mod_base = OTHER; note = 2'-deoxy-2'-fluorouridine-3'-phosphate
  modified_base 14: mod_base = OTHER; note = 2'-deoxy-2'-fluorocytidine-3'-phosphate
  modified_base 15: mod_base = OTHER; note = 2'-deoxy-2'-fluorouridine-3'-phosphate
  modified_base 16: mod_base = OTHER; note = 2'-deoxy-2'-fluorouridine-3'-phosphate
  modified_base 17: mod_base = OTHER; note = adenosine-3'-phosphate
  modified_base 18: mod_base = OTHER; note = 2'-deoxy-2'-fluorocytidine-3'-phosphate
  modified_base 19: mod_base = OTHER; note = 2'-deoxy-2'-fluorouridine-3'-phosphate
  modified_base 20: mod_base = OTHER; note = 2'-deoxythymidine-3'-phosphorothioate
  misc_feature 1..19: note = RNA
  misc_feature 20..21: note = DNA
agccaagcctcttcttacttt

SEQ ID NO: 1078 - DNA, 21 bp, synthetic construct
  source 1..21: mol_type = other DNA
  modified_base 1: mod_base = OTHER; note = adenosine-3'-phosphate
  modified_base 2: mod_base = OTHER; note = guanosine-3'-phosphate
  modified_base 3: mod_base = OTHER; note = 2'-deoxy-2'-fluorouridine-3'-phosphate
  modified_base 4: mod_base = OTHER; note = adenosine-3'-phosphate
  modified_base 5: mod_base = OTHER; note = adenosine-3'-phosphate
  modified_base 6: mod_base = OTHER; note = guanosine-3'-phosphate
  modified_base 7: mod_base = OTHER; note = adenosine-3'-phosphate
  modified_base 8: mod_base = OTHER; note = adenosine-3'-phosphate
  modified_base 9: mod_base = OTHER; note = guanosine-3'-phosphate
  modified_base 10: mod_base = OTHER; note = adenosine-3'-phosphate
  modified_base 11: mod_base = OTHER; note = guanosine-3'-phosphate
  modified_base 12: mod_base = OTHER; note = guanosine-3'-phosphate
  modified_base 13: mod_base = OTHER; note = 2'-deoxy-2'-fluorocytidine-3'-phosphate
  modified_base 14: mod_base = OTHER; note = 2'-deoxy-2'-fluorouridine-3'-phosphate
  modified_base 15: mod_base = OTHER; note = 2'-deoxy-2'-fluorouridine-3'-phosphate
  modified_base 16: mod_base = OTHER; note = guanosine-3'-phosphate
  modified_base 17: mod_base = OTHER; note = guanosine-3'-phosphate
  modified_base 18: mod_base = OTHER; note = 2'-deoxy-2'-fluorocytidine-3'-phosphate
  modified_base 19: mod_base = OTHER; note = 2'-deoxy-2'-fluorouridine-3'-phosphate
  modified_base 20: mod_base = OTHER; note = 2'-deoxythymidine-3'-phosphorothioate
  misc_feature 1..19: note = RNA
  misc_feature 20..21: note = DNA
agtaagaagaggcttggcttt

SEQ ID NO: 1079 - DNA, 21 bp, synthetic construct
  source 1..21: mol_type = other DNA
  modified_base 1: mod_base = OTHER; note = adenosine-3'-phosphate
  modified_base 2: mod_base = OTHER; note = 2'-O-methylguanosine-3'-phosphate
  modified_base 3: mod_base = OTHER; note = cytidine-3'-phosphate
  modified_base 4: mod_base = OTHER; note = 2'-O-methylcytidine-3'-phosphate
  modified_base 5: mod_base = OTHER; note = adenosine-3'-phosphate
  modified_base 6: mod_base = OTHER; note = 2'-O-methyladenosine-3'-phosphate
  modified_base 7: mod_base = OTHER; note = guanosine-3'-phosphate
  modified_base 8: mod_base = OTHER; note = 2'-O-methylcytidine-3'-phosphate
  modified_base 9: mod_base = OTHER; note = cytidine-3'-phosphate
  modified_base 10: mod_base = OTHER; note = 2'-O-methyluridine-3'-phosphate
  modified_base 11: mod_base = OTHER; note = cytidine-3'-phosphate
  modified_base 12: mod_base = OTHER; note = 2'-O-methyluridine-3'-phosphate
  modified_base 13: mod_base = OTHER; note = uridine-3'-phosphate
  modified_base 14: mod_base = OTHER; note = 2'-O-methylcytidine-3'-phosphate
  modified_base 15: mod_base = OTHER; note = uridine-3'-phosphate
  modified_base 16: mod_base = OTHER; note = 2'-O-methyluridine-3'-phosphate
  modified_base 17: mod_base = OTHER; note = adenosine-3'-phosphate
  modified_base 18: mod_base = OTHER; note = 2'-O-methylcytidine-3'-phosphate
  modified_base 19: mod_base = OTHER; note = uridine-3'-phosphate
  modified_base 20: mod_base = OTHER; note = 2'-deoxythymidine-3'-phosphorothioate
  misc_feature 1..19: note = RNA
  misc_feature 20..21: note = DNA
agccaagcctcttcttacttt

SEQ ID NO: 1080 - DNA, 21 bp, synthetic construct
  source 1..21: mol_type = other DNA
  modified_base 1: mod_base = OTHER; note = 2'-O-methyladenosine-3'-phosphate 5'phosphate
  modified_base 2: mod_base = OTHER; note = 2'-deoxy-2'-fluoroguanosine-3'-phosphate
  modified_base 3: mod_base = OTHER; note = 2'-O-methyluridine-3'-phosphate
  modified_base 4: mod_base = OTHER; note = 2'-deoxy-2'-fluoroadenosine-3'-phosphate
  modified_base 5: mod_base = OTHER; note = 2'-O-methyladenosine-3'-phosphate
  modified_base 6: mod_base = OTHER; note = 2'-deoxy-2'-fluoroguanosine-3'-phosphate
  modified_base 7: mod_base = OTHER; note = 2'-O-methyladenosine-3'-phosphate
  modified_base 8: mod_base = OTHER; note = 2'-deoxy-2'-fluoroadenosine-3'-phosphate
  modified_base 9: mod_base = OTHER; note = 2'-O-methylguanosine-3'-phosphate
  modified_base 10: mod_base = OTHER; note = 2'-deoxy-2'-fluoroadenosine-3'-phosphate
  modified_base 11: mod_base = OTHER; note = 2'-O-methylguanosine-3'-phosphate
  modified_base 12: mod_base = OTHER; note = 2'-deoxy-2'-fluoroguanosine-3'-phosphate
  modified_base 13: mod_base = OTHER; note = 2'-O-methylcytidine-3'-phosphate
  modified_base 14: mod_base = OTHER; note = 2'-deoxy-2'-fluorouridine-3'-phosphate
  modified_base 15: mod_base = OTHER; note = 2'-O-methyluridine-3'-phosphate
  modified_base 16: mod_base = OTHER; note = 2'-deoxy-2'-fluoroguanosine-3'-phosphate
  modified_base 17: mod_base = OTHER; note = 2'-O-methylguanosine-3'-phosphate
  modified_base 18: mod_base = OTHER; note = 2'-deoxy-2'-fluorocytidine-3'-phosphate
  modified_base 19: mod_base = OTHER; note = 2'-O-methyluridine-3'-phosphate
  modified_base 20: mod_base = OTHER; note = 2'-deoxythymidine-3'-phosphorothioate
  misc_feature 1..19: note = RNA
  misc_feature 20..21: note = DNA
agtaagaagaggcttggcttt

SEQ ID NO: 1081 - DNA, 21 bp, synthetic construct
  source 1..21: mol_type = other DNA
  modified_base 1: mod_base = OTHER; note = adenosine-3'-phosphate
  modified_base 2: mod_base = OTHER; note = 2'-O-methylguanosine-3'-phosphate
  modified_base 3: mod_base = OTHER; note = cytidine-3'-phosphate
  modified_base 4: mod_base = OTHER; note = 2'-O-methylcytidine-3'-phosphate
  modified_base 5: mod_base = OTHER; note = adenosine-3'-phosphate
  modified_base 6: mod_base = OTHER; note = 2'-O-methyladenosine-3'-phosphate
  modified_base 7: mod_base = OTHER; note = guanosine-3'-phosphate
  modified_base 8: mod_base = OTHER; note = 2'-O-methylcytidine-3'-phosphate
  modified_base 9: mod_base = OTHER; note = cytidine-3'-phosphate
  modified_base 10: mod_base = OTHER; note = 2'-O-methyluridine-3'-phosphate
  modified_base 11: mod_base = OTHER; note = cytidine-3'-phosphate
  modified_base 12: mod_base = OTHER; note = 2'-O-methyluridine-3'-phosphate
  modified_base 13: mod_base = OTHER; note = uridine-3'-phosphate
  modified_base 14: mod_base = OTHER; note = 2'-O-methylcytidine-3'-phosphate
  modified_base 15: mod_base = OTHER; note = uridine-3'-phosphate
  modified_base 16: mod_base = OTHER; note = 2'-O-methyluridine-3'-phosphate
  modified_base 17: mod_base = OTHER; note = adenosine-3'-phosphate
  modified_base 18: mod_base = OTHER; note = 2'-O-methylcytidine-3'-phosphate
  modified_base 19: mod_base = OTHER; note = uridine-3'-phosphate
  modified_base 20: mod_base = OTHER; note = 2'-deoxythymidine-3'-phosphorothioate
  misc_feature 1..19: note = RNA
  misc_feature 20..21: note = DNA
agccaagcctcttcttacttt

SEQ ID NO: 1082 - DNA, 21 bp, synthetic construct
  source 1..21: mol_type = other DNA
  modified_base 1: mod_base = OTHER; note = adenosine-3'-phosphate
  modified_base 2: mod_base = OTHER; note = guanosine-3'-phosphate
  modified_base 3: mod_base = OTHER; note = 2'-deoxy-2'-fluorouridine-3'-phosphate
  modified_base 4: mod_base = OTHER; note = adenosine-3'-phosphate
  modified_base 5: mod_base = OTHER; note = adenosine-3'-phosphate
  modified_base 6: mod_base = OTHER; note = guanosine-3'-phosphate
  modified_base 7: mod_base = OTHER; note = adenosine-3'-phosphate
  modified_base 8: mod_base = OTHER; note = adenosine-3'-phosphate
  modified_base 9: mod_base = OTHER; note = guanosine-3'-phosphate
  modified_base 10: mod_base = OTHER; note = adenosine-3'-phosphate
  modified_base 11: mod_base = OTHER; note = guanosine-3'-phosphate
  modified_base 12: mod_base = OTHER; note = guanosine-3'-phosphate
  modified_base 13: mod_base = OTHER; note = 2'-deoxy-2'-fluorocytidine-3'-phosphate
  modified_base 14: mod_base = OTHER; note = 2'-deoxy-2'-fluorouridine-3'-phosphate
  modified_base 15: mod_base = OTHER; note = 2'-deoxy-2'-fluorouridine-3'-phosphate
  modified_base 16: mod_base = OTHER; note = guanosine-3'-phosphate
  modified_base 17: mod_base = OTHER; note = guanosine-3'-phosphate
  modified_base 18: mod_base = OTHER; note = 2'-deoxy-2'-fluorocytidine-3'-phosphate
  modified_base 19: mod_base = OTHER; note = 2'-deoxy-2'-fluorouridine-3'-phosphate
  modified_base 20: mod_base = OTHER; note = 2'-deoxythymidine-3'-phosphorothioate
  misc_feature 1..19: note = RNA
  misc_feature 20..21: note = DNA
agtaagaagaggcttggcttt

SEQ ID NO: 1083 - DNA, 21 bp, synthetic construct
  source 1..21: mol_type = other DNA
  modified_base 1: mod_base = OTHER; note = 2'-deoxy-2'-fluoroadenosine-3'-phosphate
  modified_base 2: mod_base = OTHER; note = 2'-O-methylguanosine-3'-phosphate
  modified_base 3: mod_base = OTHER; note = 2'-deoxy-2'-fluorocytidine-3'-phosphate
  modified_base 4: mod_base = OTHER; note = 2'-O-methylcytidine-3'-phosphate
  modified_base 5: mod_base = OTHER; note = 2'-deoxy-2'-fluoroadenosine-3'-phosphate
  modified_base 6: mod_base = OTHER; note = 2'-O-methyladenosine-3'-phosphate
  modified_base 7: mod_base = OTHER; note = 2'-deoxy-2'-fluoroguanosine-3'-phosphate
  modified_base 8: mod_base = OTHER; note = 2'-O-methylcytidine-3'-phosphate
  modified_base 9: mod_base = OTHER; note = 2'-deoxy-2'-fluorocytidine-3'-phosphate
  modified_base 10: mod_base = OTHER; note = 2'-O-methyluridine-3'-phosphate
  modified_base 11: mod_base = OTHER; note = 2'-deoxy-2'-fluorocytidine-3'-phosphate
  modified_base 12: mod_base = OTHER; note = 2'-O-methyluridine-3'-phosphate
  modified_base 13: mod_base = OTHER; note = 2'-deoxy-2'-fluorouridine-3'-phosphate
  modified_base 14: mod_base = OTHER; note = 2'-O-methylcytidine-3'-phosphate
  modified_base 15: mod_base = OTHER; note = 2'-deoxy-2'-fluorouridine-3'-phosphate
  modified_base 16: mod_base = OTHER; note = 2'-O-methyluridine-3'-phosphate
  modified_base 17: mod_base = OTHER; note = 2'-deoxy-2'-fluoroadenosine-3'-phosphate
  modified_base 18: mod_base = OTHER; note = 2'-O-methylcytidine-3'-phosphate
  modified_base 19: mod_base = OTHER; note = 2'-deoxy-2'-fluorouridine-3'-phosphate
  modified_base 20: mod_base = OTHER; note = 2'-deoxythymidine-3'-phosphorothioate
  misc_feature 1..19: note = RNA
  misc_feature 20..21: note = DNA
agccaagcctcttcttacttt

SEQ ID NO: 1084 - DNA, 21 bp, synthetic construct
  source 1..21: mol_type = other DNA
  modified_base 1: mod_base = OTHER; note = adenosine-3'-phosphate
  modified_base 2: mod_base = OTHER; note = guanosine-3'-phosphate
  modified_base 3: mod_base = OTHER; note = uridine-3'-phosphate
  modified_base 4: mod_base = OTHER; note = adenosine-3'-phosphate
  modified_base 5: mod_base = OTHER; note = adenosine-3'-phosphate
  modified_base 6: mod_base = OTHER; note = 2'-O-methylguanosine-3'-phosphate
  modified_base 7: mod_base = OTHER; note = 2'-O-methyladenosine-3'-phosphate
  modified_base 8: mod_base = OTHER; note = adenosine-3'-phosphate
  modified_base 9: mod_base = OTHER; note = guanosine-3'-phosphate
  modified_base 10: mod_base = OTHER; note = 2'-O-methyladenosine-3'-phosphate
  modified_base 11: mod_base = OTHER; note = 2'-O-methylguanosine-3'-phosphate
  modified_base 12: mod_base = OTHER; note = guanosine-3'-phosphate
  modified_base 13: mod_base = OTHER; note = cytidine-3'-phosphate
  modified_base 14: mod_base = OTHER; note = uridine-3'-phosphate
  modified_base 15: mod_base = OTHER; note = uridine-3'-phosphate
  modified_base 16: mod_base = OTHER; note = guanosine-3'-phosphate
  modified_base 17: mod_base = OTHER; note = 2'-O-methylguanosine-3'-phosphate
  modified_base 18: mod_base = OTHER; note = 2'-O-methylcytidine-3'-phosphate
  modified_base 19: mod_base = OTHER; note = 2'-O-methyluridine-3'-phosphate
  modified_base 20: mod_base = OTHER; note = 2'-deoxythymidine-3'-phosphorothioate
  misc_feature 1..19: note = RNA
  misc_feature 20..21: note = DNA
agtaagaagaggcttggcttt

SEQ ID NO: 1085 - DNA, 21 bp, synthetic construct
  source 1..21: mol_type = other DNA
  modified_base 1: mod_base = OTHER; note = adenosine-3'-phosphate
  modified_base 2: mod_base = OTHER; note = guanosine-3'-phosphate
  modified_base 3: mod_base = OTHER; note = 2'-deoxy-2'-fluorocytidine-3'-phosphate
  modified_base 4: mod_base = OTHER; note = 2'-deoxy-2'-fluorocytidine-3'-phosphate
  modified_base 5: mod_base = OTHER; note = adenosine-3'-phosphate
  modified_base 6: mod_base = OTHER; note = adenosine-3'-phosphate
  modified_base 7: mod_base = OTHER; note = guanosine-3'-phosphate
  modified_base 8: mod_base = OTHER; note = 2'-deoxy-2'-fluorocytidine-3'-phosphate
  modified_base 9: mod_base = OTHER; note = 2'-deoxy-2'-fluorocytidine-3'-phosphate
  modified_base 10: mod_base = OTHER; note = 2'-deoxy-2'-fluorouridine-3'-phosphate
  modified_base 11: mod_base = OTHER; note = 2'-deoxy-2'-fluorocytidine-3'-phosphate
  modified_base 12: mod_base = OTHER; note = 2'-deoxy-2'-fluorouridine-3'-phosphate
  modified_base 13: mod_base = OTHER; note = 2'-deoxy-2'-fluorouridine-3'-phosphate
  modified_base 14: mod_base = OTHER; note = 2'-deoxy-2'-fluorocytidine-3'-phosphate
  modified_base 15: mod_base = OTHER; note = 2'-deoxy-2'-fluorouridine-3'-phosphate
  modified_base 16: mod_base = OTHER; note = 2'-deoxy-2'-fluorouridine-3'-phosphate
  modified_base 17: mod_base = OTHER; note = adenosine-3'-phosphate
  modified_base 18: mod_base = OTHER; note = 2'-deoxy-2'-fluorocytidine-3'-phosphate
  modified_base 19: mod_base = OTHER; note = 2'-deoxy-2'-fluorouridine-3'-phosphate
  modified_base 20: mod_base = OTHER; note = 2'-deoxythymidine-3'-phosphorothioate
  misc_feature 1..19: note = RNA
  misc_feature 20..21: note = DNA
agccaagcctcttcttacttt

SEQ ID NO: 1086 - DNA, 21 bp, synthetic construct
  source 1..21: mol_type = other DNA
  modified_base 1: mod_base = OTHER; note = adenosine-3'-phosphate
  modified_base 2: mod_base = OTHER; note = guanosine-3'-phosphate
  modified_base 3: mod_base = OTHER; note = uridine-3'-phosphate
  modified_base 4: mod_base = OTHER; note = adenosine-3'-phosphate
  modified_base 5: mod_base = OTHER; note = adenosine-3'-phosphate
  modified_base 6: mod_base = OTHER; note = 2'-O-methylguanosine-3'-phosphate
  modified_base 7: mod_base = OTHER; note = 2'-O-methyladenosine-3'-phosphate
  modified_base 8: mod_base = OTHER; note = adenosine-3'-phosphate
  modified_base 9: mod_base = OTHER; note = guanosine-3'-phosphate
  modified_base 10: mod_base = OTHER; note = 2'-O-methyladenosine-3'-phosphate
  modified_base 11: mod_base = OTHER; note = 2'-O-methylguanosine-3'-phosphate
  modified_base 12: mod_base = OTHER; note = guanosine-3'-phosphate
  modified_base 13: mod_base = OTHER; note = cytidine-3'-phosphate
  modified_base 14: mod_base = OTHER; note = uridine-3'-phosphate
  modified_base 15: mod_base = OTHER; note = uridine-3'-phosphate
  modified_base 16: mod_base = OTHER; note = guanosine-3'-phosphate
  modified_base 17: mod_base = OTHER; note = 2'-O-methylguanosine-3'-phosphate
  modified_base 18: mod_base = OTHER; note = 2'-O-methylcytidine-3'-phosphate
  modified_base 19: mod_base = OTHER; note = 2'-O-methyluridine-3'-phosphate
  modified_base 20: mod_base = OTHER; note = 2'-deoxythymidine-3'-phosphorothioate
  misc_feature 1..19: note = RNA
  misc_feature 20..21: note = DNA
agtaagaagaggcttggcttt

SEQ ID NO: 1087 - DNA, 21 bp, synthetic construct
  source 1..21: mol_type = other DNA
  modified_base 1: mod_base = OTHER; note = adenosine-3'-phosphate
  modified_base 2: mod_base = OTHER; note = 2'-O-methylguanosine-3'-phosphate
  modified_base 3: mod_base = OTHER; note = cytidine-3'-phosphate
  modified_base 4: mod_base = OTHER; note = 2'-O-methylcytidine-3'-phosphate
  modified_base 5: mod_base = OTHER; note = adenosine-3'-phosphate
  modified_base 6: mod_base = OTHER; note = 2'-O-methyladenosine-3'-phosphate
  modified_base 7: mod_base = OTHER; note = guanosine-3'-phosphate
  modified_base 8: mod_base = OTHER; note = 2'-O-methylcytidine-3'-phosphate
  modified_base 9: mod_base = OTHER; note = cytidine-3'-phosphate
  modified_base 10: mod_base = OTHER; note = 2'-O-methyluridine-3'-phosphate
  modified_base 11: mod_base = OTHER; note = cytidine-3'-phosphate
  modified_base 12: mod_base = OTHER; note = 2'-O-methyluridine-3'-phosphate
  modified_base 13: mod_base = OTHER; note = uridine-3'-phosphate
  modified_base 14: mod_base = OTHER; note = 2'-O-methylcytidine-3'-phosphate
  modified_base 15: mod_base = OTHER; note = uridine-3'-phosphate
  modified_base 16: mod_base = OTHER; note = 2'-O-methyluridine-3'-phosphate
  modified_base 17: mod_base = OTHER; note = adenosine-3'-phosphate
  modified_base 18: mod_base = OTHER; note = 2'-O-methylcytidine-3'-phosphate
  modified_base 19: mod_base = OTHER; note = uridine-3'-phosphate
  modified_base 20: mod_base = OTHER; note = 2'-deoxythymidine-3'-phosphorothioate
  misc_feature 1..19: note = RNA
  misc_feature 20..21: note = DNA
agccaagcctcttcttacttt

SEQ ID NO: 1088 - DNA, 21 bp, synthetic construct
  source 1..21: mol_type = other DNA
  modified_base 1: mod_base = OTHER; note = adenosine-3'-phosphate
  modified_base 2: mod_base = OTHER; note = guanosine-3'-phosphate
  modified_base 3: mod_base = OTHER; note = uridine-3'-phosphate
  modified_base 4: mod_base = OTHER; note = adenosine-3'-phosphate
  modified_base 5: mod_base = OTHER; note = adenosine-3'-phosphate
  modified_base 6: mod_base = OTHER; note = 2'-O-methylguanosine-3'-phosphate
  modified_base 7: mod_base = OTHER; note = 2'-O-methyladenosine-3'-phosphate
  modified_base 8: mod_base = OTHER; note = adenosine-3'-phosphate
  modified_base 9: mod_base = OTHER; note = guanosine-3'-phosphate
  modified_base 10: mod_base = OTHER; note = 2'-O-methyladenosine-3'-phosphate
  modified_base 11: mod_base = OTHER; note = 2'-O-methylguanosine-3'-phosphate
  modified_base 12: mod_base = OTHER; note = guanosine-3'-phosphate
  modified_base 13: mod_base = OTHER; note = cytidine-3'-phosphate
  modified_base 14: mod_base = OTHER; note = uridine-3'-phosphate
  modified_base 15: mod_base = OTHER; note = uridine-3'-phosphate
  modified_base 16: mod_base = OTHER; note = guanosine-3'-phosphate
  modified_base 17: mod_base = OTHER; note = 2'-O-methylguanosine-3'-phosphate
  modified_base 18: mod_base = OTHER; note = 2'-O-methylcytidine-3'-phosphate
  modified_base 19: mod_base = OTHER; note = 2'-O-methyluridine-3'-phosphate
  modified_base 20: mod_base = OTHER; note = 2'-deoxythymidine-3'-phosphorothioate
  misc_feature 1..19: note = RNA
  misc_feature 20..21: note = DNA
agtaagaagaggcttggcttt

SEQ ID NO: 1089 - DNA, 21 bp, synthetic construct
  source 1..21: mol_type = other DNA
  modified_base 1: mod_base = OTHER; note = 2'-deoxy-2'-fluorouridine-3'-phosphate
  modified_base 2: mod_base = OTHER; note = 2'-O-methylguanosine-3'-phosphate
  modified_base 3: mod_base = OTHER; note = 2'-deoxy-2'-fluoroguanosine-3'-phosphate
  modified_base 4: mod_base = OTHER; note = 2'-O-methyluridine-3'-phosphate
  modified_base 5: mod_base = OTHER; note = 2'-deoxy-2'-fluorouridine-3'-phosphate
  modified_base 6: mod_base = OTHER; note = 2'-O-methylcytidine-3'-phosphate
  modified_base 7: mod_base = OTHER; note = 2'-deoxy-2'-fluorocytidine-3'-phosphate
  modified_base 8: mod_base = OTHER; note = 2'-O-methylcytidine-3'-phosphate
  modified_base 9: mod_base = OTHER; note = 2'-deoxy-2'-fluorouridine-3'-phosphate
  modified_base 10: mod_base = OTHER; note = 2'-O-methylguanosine-3'-phosphate
  modified_base 11: mod_base = OTHER; note = 2'-deoxy-2'-fluoroadenosine-3'-phosphate
  modified_base 12: mod_base = OTHER; note = 2'-O-methylguanosine-3'-phosphate
  modified_base 13: mod_base = OTHER; note = 2'-deoxy-2'-fluoroguanosine-3'-phosphate
  modified_base 14: mod_base = OTHER; note = 2'-O-methyladenosine-3'-phosphate
  modified_base 15: mod_base = OTHER; note = 2'-deoxy-2'-fluorocytidine-3'-phosphate
  modified_base 16: mod_base = OTHER; note = 2'-O-methylcytidine-3'-phosphate
  modified_base 17: mod_base = OTHER; note = 2'-deoxy-2'-fluoroadenosine-3'-phosphate
  modified_base 18: mod_base = OTHER; note = 2'-O-methylguanosine-3'-phosphate
  modified_base 19: mod_base = OTHER; note = 2'-deoxy-2'-fluorocytidine-3'-phosphate
  modified_base 20: mod_base = OTHER; note = 2'-deoxythymidine-3'-phosphorothioate
  misc_feature 1..19: note = RNA
  misc_feature 20..21: note = DNA
tggttccctgaggaccagctt

SEQ ID NO: 1090 - DNA, 21 bp, synthetic construct
  source 1..21: mol_type = other DNA
  modified_base 1: mod_base = OTHER; note = 2'-O-methylguanosine-3'-phosphate 5'phosphate
  modified_base 2: mod_base = OTHER; note = 2'-deoxy-2'-fluorocytidine-3'-phosphate
  modified_base 3: mod_base = OTHER; note = 2'-O-methyluridine-3'-phosphate
  modified_base 4: mod_base = OTHER; note = 2'-deoxy-2'-fluoroguanosine-3'-phosphate
  modified_base 5: mod_base = OTHER; note = 2'-O-methylguanosine-3'-phosphate
  modified_base 6: mod_base = OTHER; note = 2'-deoxy-2'-fluorouridine-3'-phosphate
  modified_base 7: mod_base = OTHER; note = 2'-O-methylcytidine-3'-phosphate
  modified_base 8: mod_base = OTHER; note = 2'-deoxy-2'-fluorocytidine-3'-phosphate
  modified_base 9: mod_base = OTHER; note = 2'-O-methyluridine-3'-phosphate
  modified_base 10: mod_base = OTHER; note = 2'-deoxy-2'-fluorocytidine-3'-phosphate
  modified_base 11: mod_base = OTHER; note = 2'-O-methyladenosine-3'-phosphate
  modified_base 12: mod_base = OTHER; note = 2'-deoxy-2'-fluoroguanosine-3'-phosphate
  modified_base 13: mod_base = OTHER; note = 2'-O-methylguanosine-3'-phosphate
  modified_base 14: mod_base = OTHER; note = 2'-deoxy-2'-fluoroguanosine-3'-phosphate
  modified_base 15: mod_base = OTHER; note = 2'-O-methyladenosine-3'-phosphate
  modified_base 16: mod_base = OTHER; note = 2'-deoxy-2'-fluoroadenosine-3'-phosphate
  modified_base 17: mod_base = OTHER; note = 2'-O-methylcytidine-3'-phosphate
  modified_base 18: mod_base = OTHER; note = 2'-deoxy-2'-fluorocytidine-3'-phosphate
  modified_base 19: mod_base = OTHER; note = 2'-O-methyladenosine-3'-phosphate
  modified_base 20: mod_base = OTHER; note = 2'-deoxythymidine-3'-phosphorothioate
  misc_feature 1..19: note = RNA
  misc_feature 20..21: note = DNA
gctggtcctcagggaaccatt

SEQ ID NO: 1091 - DNA, 21 bp, synthetic construct
  source 1..21: mol_type = other DNA
  modified_base 1: mod_base = OTHER; note = 2'-deoxy-2'-fluorouridine-3'-phosphate
  modified_base 2: mod_base = OTHER; note = guanosine-3'-phosphate
  modified_base 3: mod_base = OTHER; note = guanosine-3'-phosphate
  modified_base 4: mod_base = OTHER; note = 2'-deoxy-2'-fluorouridine-3'-phosphate
  modified_base 5: mod_base = OTHER; note = 2'-deoxy-2'-fluorouridine-3'-phosphate
  modified_base 6: mod_base = OTHER; note = 2'-deoxy-2'-fluorocytidine-3'-phosphate
  modified_base 7: mod_base = OTHER; note = 2'-deoxy-2'-fluorocytidine-3'-phosphate
  modified_base 8: mod_base = OTHER; note = 2'-deoxy-2'-fluorocytidine-3'-phosphate
  modified_base 9: mod_base = OTHER; note = 2'-deoxy-2'-fluorouridine-3'-phosphate
  modified_base 10: mod_base = OTHER; note = guanosine-3'-phosphate
  modified_base 11: mod_base = OTHER; note = adenosine-3'-phosphate
  modified_base 12: mod_base = OTHER; note = guanosine-3'-phosphate
  modified_base 13: mod_base = OTHER; note = guanosine-3'-phosphate
  modified_base 14: mod_base = OTHER; note = adenosine-3'-phosphate
  modified_base 15: mod_base = OTHER; note = 2'-deoxy-2'-fluorocytidine-3'-phosphate
  modified_base 16: mod_base = OTHER; note = 2'-deoxy-2'-fluorocytidine-3'-phosphate
  modified_base 17: mod_base = OTHER; note = adenosine-3'-phosphate
  modified_base 18: mod_base = OTHER; note = guanosine-3'-phosphate
  modified_base 19: mod_base = OTHER; note = 2'-deoxy-2'-fluorocytidine-3'-phosphate
  modified_base 20: mod_base = OTHER; note = 2'-deoxythymidine-3'-phosphorothioate
  misc_feature 1..19: note = RNA
  misc_feature 20..21: note = DNA
tggttccctgaggaccagctt

SEQ ID NO: 1092 - DNA, 21 bp, synthetic construct
  source 1..21: mol_type = other DNA
  modified_base 1: mod_base = OTHER; note = guanosine-3'-phosphate
  modified_base 2: mod_base = OTHER; note = 2'-deoxy-2'-fluorocytidine-3'-phosphate
  modified_base 3: mod_base = OTHER; note = 2'-deoxy-2'-fluorouridine-3'-phosphate
  modified_base 4: mod_base = OTHER; note = guanosine-3'-phosphate
  modified_base 5: mod_base = OTHER; note = guanosine-3'-phosphate
  modified_base 6: mod_base = OTHER; note = 2'-deoxy-2'-fluorouridine-3'-phosphate
  modified_base 7: mod_base = OTHER; note = 2'-deoxy-2'-fluorocytidine-3'-phosphate
  modified_base 8: mod_base = OTHER; note = 2'-deoxy-2'-fluorocytidine-3'-phosphate
  modified_base 9: mod_base = OTHER; note = 2'-deoxy-2'-fluorouridine-3'-phosphate
  modified_base 10: mod_base = OTHER; note = 2'-deoxy-2'-fluorocytidine-3'-phosphate
  modified_base 11: mod_base = OTHER; note = adenosine-3'-phosphate
  modified_base 12: mod_base = OTHER; note = guanosine-3'-phosphate
  modified_base 13: mod_base = OTHER; note = guanosine-3'-phosphate
  modified_base 14: mod_base = OTHER; note = guanosine-3'-phosphate
  modified_base 15: mod_base = OTHER; note = adenosine-3'-phosphate
  modified_base 16: mod_base = OTHER; note = adenosine-3'-phosphate
  modified_base 17: mod_base = OTHER; note = 2'-deoxy-2'-fluorocytidine-3'-phosphate
  modified_base 18: mod_base = OTHER; note = 2'-deoxy-2'-fluorocytidine-3'-phosphate
  modified_base 19: mod_base = OTHER; note = adenosine-3'-phosphate
  modified_base 20: mod_base = OTHER; note = 2'-deoxythymidine-3'-phosphorothioate
  misc_feature 1..19: note = RNA
  misc_feature 20..21: note = DNA
gctggtcctcagggaaccatt

SEQ ID NO: 1093 - DNA, 21 bp, synthetic construct
  source 1..21: mol_type = other DNA
  modified_base 1: mod_base = OTHER; note = uridine-3'-phosphate
  modified_base 2: mod_base = OTHER; note = 2'-O-methylguanosine-3'-phosphate
  modified_base 3: mod_base = OTHER; note = guanosine-3'-phosphate
  modified_base 4: mod_base = OTHER; note = 2'-O-methyluridine-3'-phosphate
  modified_base 5: mod_base = OTHER; note = uridine-3'-phosphate
  modified_base 6: mod_base = OTHER; note = 2'-O-methylcytidine-3'-phosphate
  modified_base 7: mod_base = OTHER; note = cytidine-3'-phosphate
  modified_base 8: mod_base = OTHER; note = 2'-O-methylcytidine-3'-phosphate
  modified_base 9: mod_base = OTHER; note = uridine-3'-phosphate
  modified_base 10: mod_base = OTHER; note = 2'-O-methylguanosine-3'-phosphate
  modified_base 11: mod_base = OTHER; note = adenosine-3'-phosphate
  modified_base 12: mod_base = OTHER; note = 2'-O-methylguanosine-3'-phosphate
  modified_base 13: mod_base = OTHER; note = guanosine-3'-phosphate
  modified_base 14: mod_base = OTHER; note = 2'-O-methyladenosine-3'-phosphate
  modified_base 15: mod_base = OTHER; note = cytidine-3'-phosphate
  modified_base 16: mod_base = OTHER; note = 2'-O-methylcytidine-3'-phosphate
  modified_base 17: mod_base = OTHER; note = adenosine-3'-phosphate
  modified_base 18: mod_base = OTHER; note = 2'-O-methylguanosine-3'-phosphate
  modified_base 19: mod_base = OTHER; note = cytidine-3'-phosphate
  modified_base 20: mod_base = OTHER; note = 2'-deoxythymidine-3'-phosphorothioate
  misc_feature 1..19: note = RNA
  misc_feature 20..21: note = DNA
tggttccctgaggaccagctt

SEQ ID NO: 1094 - DNA, 21 bp, synthetic construct
  source 1..21: mol_type = other DNA
  modified_base 1: mod_base = OTHER; note = 2'-O-methylguanosine-3'-phosphate 5'phosphate
  modified_base 2: mod_base = OTHER; note = 2'-deoxy-2'-fluorocytidine-3'-phosphate
  modified_base 3: mod_base = OTHER; note = 2'-O-methyluridine-3'-phosphate
  modified_base 4: mod_base = OTHER; note = 2'-deoxy-2'-fluoroguanosine-3'-phosphate
  modified_base 5: mod_base = OTHER; note = 2'-O-methylguanosine-3'-phosphate
  modified_base 6: mod_base = OTHER; note = 2'-deoxy-2'-fluorouridine-3'-phosphate
  modified_base 7: mod_base = OTHER; note = 2'-O-methylcytidine-3'-phosphate
  modified_base 8: mod_base = OTHER; note = 2'-deoxy-2'-fluorocytidine-3'-phosphate
  modified_base 9: mod_base = OTHER; note = 2'-O-methyluridine-3'-phosphate
  modified_base 10: mod_base = OTHER; note = 2'-deoxy-2'-fluorocytidine-3'-phosphate
  modified_base 11: mod_base = OTHER; note = 2'-O-methyladenosine-3'-phosphate
  modified_base 12: mod_base = OTHER; note = 2'-deoxy-2'-fluoroguanosine-3'-phosphate
  modified_base 13: mod_base = OTHER; note = 2'-O-methylguanosine-3'-phosphate
  modified_base 14: mod_base = OTHER; note = 2'-deoxy-2'-fluoroguanosine-3'-phosphate
  modified_base 15: mod_base = OTHER; note = 2'-O-methyladenosine-3'-phosphate
  modified_base 16: mod_base = OTHER; note = 2'-deoxy-2'-fluoroadenosine-3'-phosphate
  modified_base 17: mod_base = OTHER; note = 2'-O-methylcytidine-3'-phosphate
  modified_base 18: mod_base = OTHER; note = 2'-deoxy-2'-fluorocytidine-3'-phosphate
  modified_base 19: mod_base = OTHER; note = 2'-O-methyladenosine-3'-phosphate
  modified_base 20: mod_base = OTHER; note = 2'-deoxythymidine-3'-phosphorothioate
  misc_feature 1..19: note = RNA
  misc_feature 20..21: note = DNA
gctggtcctcagggaaccatt

SEQ ID NO: 1095 - DNA, 21 bp, synthetic construct
  source 1..21: mol_type = other DNA
  modified_base 1: mod_base = OTHER; note = uridine-3'-phosphate
  modified_base 2: mod_base = OTHER; note = 2'-O-methylguanosine-3'-phosphate
  modified_base 3: mod_base = OTHER; note = guanosine-3'-phosphate
  modified_base 4: mod_base = OTHER; note = 2'-O-methyluridine-3'-phosphate
  modified_base 5: mod_base = OTHER; note = uridine-3'-phosphate
  modified_base 6: mod_base = OTHER; note = 2'-O-methylcytidine-3'-phosphate
  modified_base 7: mod_base = OTHER; note = cytidine-3'-phosphate
  modified_base 8: mod_base = OTHER; note = 2'-O-methylcytidine-3'-phosphate
  modified_base 9: mod_base = OTHER; note = uridine-3'-phosphate
  modified_base 10: mod_base = OTHER; note = 2'-O-methylguanosine-3'-phosphate
  modified_base 11: mod_base = OTHER; note = adenosine-3'-phosphate
  modified_base 12: mod_base = OTHER; note = 2'-O-methylguanosine-3'-phosphate
  modified_base 13: mod_base = OTHER; note = guanosine-3'-phosphate
  modified_base 14: mod_base = OTHER; note = 2'-O-methyladenosine-3'-phosphate
  modified_base 15: mod_base = OTHER; note = cytidine-3'-phosphate
  modified_base 16: mod_base = OTHER; note = 2'-O-methylcytidine-3'-phosphate
  modified_base 17: mod_base = OTHER; note = adenosine-3'-phosphate
  modified_base 18: mod_base = OTHER; note = 2'-O-methylguanosine-3'-phosphate
  modified_base 19: mod_base = OTHER; note = cytidine-3'-phosphate
  modified_base 20: mod_base = OTHER; note = 2'-deoxythymidine-3'-phosphorothioate
  misc_feature 1..19: note = RNA
  misc_feature 20..21: note = DNA
tggttccctgaggaccagctt

SEQ ID NO: 1096 - DNA, 21 bp, synthetic construct
  source 1..21: mol_type = other DNA
  modified_base 1: mod_base = OTHER; note = guanosine-3'-phosphate
  modified_base 2: mod_base = OTHER; note = 2'-deoxy-2'-fluorocytidine-3'-phosphate
  modified_base 3: mod_base = OTHER; note = 2'-deoxy-2'-fluorouridine-3'-phosphate
  modified_base 4: mod_base = OTHER; note = guanosine-3'-phosphate
  modified_base 5: mod_base = OTHER; note = guanosine-3'-phosphate
  modified_base 6: mod_base = OTHER; note = 2'-deoxy-2'-fluorouridine-3'-phosphate
  modified_base 7: mod_base = OTHER; note = 2'-deoxy-2'-fluorocytidine-3'-phosphate
  modified_base 8: mod_base = OTHER; note = 2'-deoxy-2'-fluorocytidine-3'-phosphate
  modified_base 9: mod_base = OTHER; note = 2'-deoxy-2'-fluorouridine-3'-phosphate
  modified_base 10: mod_base = OTHER; note = 2'-deoxy-2'-fluorocytidine-3'-phosphate
  modified_base 11: mod_base = OTHER; note = adenosine-3'-phosphate
  modified_base 12: mod_base = OTHER; note = guanosine-3'-phosphate
  modified_base 13: mod_base = OTHER; note = guanosine-3'-phosphate
  modified_base 14: mod_base = OTHER; note = guanosine-3'-phosphate
  modified_base 15: mod_base = OTHER; note = adenosine-3'-phosphate
  modified_base 16: mod_base = OTHER; note = adenosine-3'-phosphate
  modified_base 17: mod_base = OTHER; note = 2'-deoxy-2'-fluorocytidine-3'-phosphate
  modified_base 18: mod_base = OTHER; note = 2'-deoxy-2'-fluorocytidine-3'-phosphate
  modified_base 19: mod_base = OTHER; note = adenosine-3'-phosphate
  modified_base 20: mod_base = OTHER; note = 2'-deoxythymidine-3'-phosphorothioate
  misc_feature 1..19: note = RNA
  misc_feature 20..21: note = DNA
gctggtcctcagggaaccatt

SEQ ID NO: 1097 - DNA, 21 bp, synthetic construct
  source 1..21: mol_type = other DNA
  modified_base 1: mod_base = OTHER; note = 2'-deoxy-2'-fluorouridine-3'-phosphate
  modified_base 2: mod_base = OTHER; note = 2'-O-methylguanosine-3'-phosphate
  modified_base 3: mod_base = OTHER; note = 2'-deoxy-2'-fluoroguanosine-3'-phosphate
  modified_base 4: mod_base = OTHER; note = 2'-O-methyluridine-3'-phosphate
  modified_base 5: mod_base = OTHER; note = 2'-deoxy-2'-fluorouridine-3'-phosphate
  modified_base 6: mod_base = OTHER; note = 2'-O-methylcytidine-3'-phosphate
  modified_base 7: mod_base = OTHER; note = 2'-deoxy-2'-fluorocytidine-3'-phosphate
  modified_base 8: mod_base = OTHER; note = 2'-O-methylcytidine-3'-phosphate
  modified_base 9: mod_base = OTHER; note = 2'-deoxy-2'-fluorouridine-3'-phosphate
  modified_base 10: mod_base = OTHER; note = 2'-O-methylguanosine-3'-phosphate
  modified_base 11: mod_base = OTHER; note = 2'-deoxy-2'-fluoroadenosine-3'-phosphate
  modified_base 12: mod_base = OTHER; note = 2'-O-methylguanosine-3'-phosphate
  modified_base 13: mod_base = OTHER; note = 2'-deoxy-2'-fluoroguanosine-3'-phosphate
  modified_base 14: mod_base = OTHER; note = 2'-O-methyladenosine-3'-phosphate
  modified_base 15: mod_base = OTHER; note = 2'-deoxy-2'-fluorocytidine-3'-phosphate
  modified_base 16: mod_base = OTHER; note = 2'-O-methylcytidine-3'-phosphate
  modified_base 17: mod_base = OTHER; note = 2'-deoxy-2'-fluoroadenosine-3'-phosphate
  modified_base 18: mod_base = OTHER; note = 2'-O-methylguanosine-3'-phosphate
  modified_base 19: mod_base = OTHER; note = 2'-deoxy-2'-fluorocytidine-3'-phosphate
  modified_base 20: mod_base = OTHER; note = 2'-deoxythymidine-3'-phosphorothioate
  misc_feature 1..19: note = RNA
  misc_feature 20..21: note = DNA
tggttccctgaggaccagctt

SEQ ID NO: 1098 - DNA, 21 bp, synthetic construct
  source 1..21: mol_type = other DNA
  modified_base 1: mod_base = OTHER; note = guanosine-3'-phosphate
  modified_base 2: mod_base = OTHER; note = cytidine-3'-phosphate
  modified_base 3: mod_base = OTHER; note = uridine-3'-phosphate
  modified_base 4: mod_base = OTHER; note = guanosine-3'-phosphate
  modified_base 5: mod_base = OTHER; note = guanosine-3'-phosphate
  modified_base 6: mod_base = OTHER; note = 2'-O-methyluridine-3'-phosphate
  modified_base 7: mod_base = OTHER; note = 2'-O-methylcytidine-3'-phosphate
  modified_base 8: mod_base = OTHER; note = cytidine-3'-phosphate
  modified_base 9: mod_base = OTHER; note = uridine-3'-phosphate
  modified_base 10: mod_base = OTHER; note = 2'-O-methylcytidine-3'-phosphate
  modified_base 11: mod_base = OTHER; note = 2'-O-methyladenosine-3'-phosphate
  modified_base 12: mod_base = OTHER; note = guanosine-3'-phosphate
  modified_base 13: mod_base = OTHER; note = guanosine-3'-phosphate
  modified_base 14: mod_base = OTHER; note = guanosine-3'-phosphate
  modified_base 15: mod_base = OTHER; note = adenosine-3'-phosphate
  modified_base 16: mod_base = OTHER; note = adenosine-3'-phosphate
  modified_base 17: mod_base = OTHER; note = 2'-O-methylcytidine-3'-phosphate
  modified_base 18: mod_base = OTHER; note = 2'-O-methylcytidine-3'-phosphate
  modified_base 19: mod_base = OTHER; note = 2'-O-methyladenosine-3'-phosphate
  modified_base 20: mod_base = OTHER; note = 2'-deoxythymidine-3'-phosphorothioate
  misc_feature 1..19: note = RNA
  misc_feature 20..21: note = DNA
gctggtcctcagggaaccatt

SEQ ID NO: 1099 - DNA, 21 bp, synthetic construct
  source 1..21: mol_type = other DNA
  modified_base 1: mod_base = OTHER; note = 2'-deoxy-2'-fluorouridine-3'-phosphate
  modified_base 2: mod_base = OTHER; note = guanosine-3'-phosphate
  modified_base 3: mod_base = OTHER; note = guanosine-3'-phosphate
  modified_base 4: mod_base = OTHER; note = 2'-deoxy-2'-fluorouridine-3'-phosphate
  modified_base 5: mod_base = OTHER; note = 2'-deoxy-2'-fluorouridine-3'-phosphate
  modified_base 6: mod_base = OTHER; note = 2'-deoxy-2'-fluorocytidine-3'-phosphate
  modified_base 7: mod_base = OTHER; note = 2'-deoxy-2'-fluorocytidine-3'-phosphate
  modified_base 8: mod_base = OTHER; note = 2'-deoxy-2'-fluorocytidine-3'-phosphate
  modified_base 9: mod_base = OTHER; note = 2'-deoxy-2'-fluorouridine-3'-phosphate
  modified_base 10: mod_base = OTHER; note = guanosine-3'-phosphate
  modified_base 11: mod_base = OTHER; note = adenosine-3'-phosphate
  modified_base 12: mod_base = OTHER; note = guanosine-3'-phosphate
  modified_base 13: mod_base = OTHER; note = guanosine-3'-phosphate
  modified_base 14: mod_base = OTHER; note = adenosine-3'-phosphate
  modified_base 15: mod_base = OTHER; note = 2'-deoxy-2'-fluorocytidine-3'-phosphate
  modified_base 16: mod_base = OTHER; note = 2'-deoxy-2'-fluorocytidine-3'-phosphate
  modified_base 17: mod_base = OTHER; note = adenosine-3'-phosphate
  modified_base 18: mod_base = OTHER; note = guanosine-3'-phosphate
  modified_base 19: mod_base = OTHER; note = 2'-deoxy-2'-fluorocytidine-3'-phosphate
  modified_base 20: mod_base = OTHER; note = 2'-deoxythymidine-3'-phosphorothioate
  misc_feature 1..19: note = RNA
  misc_feature 20..21: note = DNA
tggttccctgaggaccagctt

SEQ ID NO: 1100 - DNA, 21 bp, synthetic construct
  source 1..21: mol_type = other DNA
  modified_base 1: mod_base = OTHER; note = guanosine-3'-phosphate
  modified_base 2: mod_base = OTHER; note = cytidine-3'-phosphate
  modified_base 3: mod_base = OTHER; note = uridine-3'-phosphate
  modified_base 4: mod_base = OTHER; note = guanosine-3'-phosphate
  modified_base 5: mod_base = OTHER; note = guanosine-3'-phosphate
  modified_base 6: mod_base = OTHER; note = 2'-O-methyluridine-3'-phosphate
  modified_base 7: mod_base = OTHER; note = 2'-O-methylcytidine-3'-phosphate
  modified_base 8: mod_base = OTHER; note = cytidine-3'-phosphate
  modified_base 9: mod_base = OTHER; note = uridine-3'-phosphate
  modified_base 10: mod_base = OTHER; note = 2'-O-methylcytidine-3'-phosphate
  modified_base 11: mod_base = OTHER; note = 2'-O-methyladenosine-3'-phosphate
  modified_base 12: mod_base = OTHER; note = guanosine-3'-phosphate
  modified_base 13: mod_base = OTHER; note = guanosine-3'-phosphate
  modified_base 14: mod_base = OTHER; note = guanosine-3'-phosphate
  modified_base 15: mod_base = OTHER; note = adenosine-3'-phosphate
  modified_base 16: mod_base = OTHER; note = adenosine-3'-phosphate
  modified_base 17: mod_base = OTHER; note = 2'-O-methylcytidine-3'-phosphate
  modified_base 18: mod_base = OTHER; note = 2'-O-methylcytidine-3'-phosphate
  modified_base 19: mod_base = OTHER; note = 2'-O-methyladenosine-3'-phosphate
  modified_base 20: mod_base = OTHER; note = 2'-deoxythymidine-3'-phosphorothioate
  misc_feature 1..19: note = RNA
  misc_feature 20..21: note = DNA
gctggtcctcagggaaccatt

SEQ ID NO: 1101 - DNA, 21 bp, synthetic construct
  source 1..21: mol_type = other DNA
  modified_base 1: mod_base = OTHER; note = uridine-3'-phosphate
  modified_base 2: mod_base = OTHER; note = 2'-O-methylguanosine-3'-phosphate
  modified_base 3: mod_base = OTHER; note = guanosine-3'-phosphate
  modified_base 4: mod_base = OTHER; note = 2'-O-methyluridine-3'-phosphate
  modified_base 5: mod_base = OTHER; note = uridine-3'-phosphate
  modified_base 6: mod_base = OTHER; note = 2'-O-methylcytidine-3'-phosphate
  modified_base 7: mod_base = OTHER; note = cytidine-3'-phosphate
  modified_base 8: mod_base = OTHER; note = 2'-O-methylcytidine-3'-phosphate
  modified_base 9: mod_base = OTHER; note = uridine-3'-phosphate
  modified_base 10: mod_base = OTHER; note = 2'-O-methylguanosine-3'-phosphate
  modified_base 11: mod_base = OTHER; note = adenosine-3'-phosphate
  modified_base 12: mod_base = OTHER; note = 2'-O-methylguanosine-3'-phosphate
  modified_base 13: mod_base = OTHER; note = guanosine-3'-phosphate
  modified_base 14: mod_base = OTHER; note = 2'-O-methyladenosine-3'-phosphate
  modified_base 15: mod_base = OTHER; note = cytidine-3'-phosphate
  modified_base 16: mod_base = OTHER; note = 2'-O-methylcytidine-3'-phosphate
  modified_base 17: mod_base = OTHER; note = adenosine-3'-phosphate
  modified_base 18: mod_base = OTHER; note = 2'-O-methylguanosine-3'-phosphate
  modified_base 19: mod_base = OTHER; note = cytidine-3'-phosphate
  modified_base 20: mod_base = OTHER; note = 2'-deoxythymidine-3'-phosphorothioate
  misc_feature 1..19: note = RNA
  misc_feature 20..21: note = DNA
tggttccctgaggaccagctt

SEQ ID NO: 1102 - DNA, 21 bp, synthetic construct
  source 1..21: mol_type = other DNA
  modified_base 1: mod_base = OTHER; note = guanosine-3'-phosphate
  modified_base 2: mod_base = OTHER; note = cytidine-3'-phosphate
  modified_base 3: mod_base = OTHER; note = uridine-3'-phosphate
  modified_base 4: mod_base = OTHER; note = guanosine-3'-phosphate
  modified_base 5: mod_base = OTHER; note = guanosine-3'-phosphate
  modified_base 6: mod_base = OTHER; note = 2'-O-methyluridine-3'-phosphate
  modified_base 7: mod_base = OTHER; note = 2'-O-methylcytidine-3'-phosphate
  modified_base 8: mod_base = OTHER; note = cytidine-3'-phosphate
  modified_base 9: mod_base = OTHER; note = uridine-3'-phosphate
  modified_base 10: mod_base = OTHER; note = 2'-O-methylcytidine-3'-phosphate
  modified_base 11: mod_base = OTHER; note = 2'-O-methyladenosine-3'-phosphate
  modified_base 12: mod_base = OTHER; note = guanosine-3'-phosphate
  modified_base 13: mod_base = OTHER; note = guanosine-3'-phosphate
  modified_base 14: mod_base = OTHER; note = guanosine-3'-phosphate
  modified_base 15: mod_base = OTHER; note = adenosine-3'-phosphate
  modified_base 16: mod_base = OTHER; note = adenosine-3'-phosphate
  modified_base 17: mod_base = OTHER; note = 2'-O-methylcytidine-3'-phosphate
  modified_base 18: mod_base = OTHER; note = 2'-O-methylcytidine-3'-phosphate
  modified_base 19: mod_base = OTHER; note = 2'-O-methyladenosine-3'-phosphate
  modified_base 20: mod_base = OTHER; note = 2'-deoxythymidine-3'-phosphorothioate
  misc_feature 1..19: note = RNA
  misc_feature 20..21: note = DNA
gctggtcctcagggaaccatt

SEQ ID NO: 1103 - DNA, 21 bp, synthetic construct
  source 1..21: mol_type = other DNA
  modified_base 1: mod_base = OTHER; note = uridine-3'-phosphate
  modified_base 2: mod_base = OTHER; note = cytidine-3'-phosphate
  modified_base 3: mod_base = OTHER; note = uridine-3'-phosphate
  modified_base 4: mod_base = OTHER; note = uridine-3'-phosphate
  modified_base 5: mod_base = OTHER; note = cytidine-3'-phosphate
  modified_base 6: mod_base = OTHER; note = uridine-3'-phosphate
  modified_base 7: mod_base = OTHER; note = uridine-3'-phosphate
  modified_base 8: mod_base = OTHER; note = adenosine-3'-phosphate
  modified_base 9: mod_base = OTHER; note = cytidine-3'-phosphate
  modified_base 10: mod_base = OTHER; note = uridine-3'-phosphate
  modified_base 11: mod_base = OTHER; note = uridine-3'-phosphate
  modified_base 12: mod_base = OTHER; note = cytidine-3'-phosphate
  modified_base 13: mod_base = OTHER; note = adenosine-3'-phosphate
  modified_base 14: mod_base = OTHER; note = cytidine-3'-phosphate
  modified_base 15: mod_base = OTHER; note = cytidine-3'-phosphate
  modified_base 16: mod_base = OTHER; note = cytidine-3'-phosphate
  modified_base 17: mod_base = OTHER; note = guanosine-3'-phosphate
  modified_base 18: mod_base = OTHER; note = guanosine-3'-phosphate
  modified_base 19: mod_base = OTHER; note = cytidine-3'-phosphate
  misc_feature 1..19: note = RNA
  misc_feature 20..21: note = DNA
tcttcttacttcacccggctt

SEQ ID NO: 1104 - DNA, 21 bp, synthetic construct
  source 1..21: mol_type = other DNA
  modified_base 1: mod_base = OTHER; note = guanosine-3'-phosphate
  modified_base 2: mod_base = OTHER; note = cytidine-3'-phosphate
  modified_base 3: mod_base = OTHER; note = cytidine-3'-phosphate
  modified_base 4: mod_base = OTHER; note = guanosine-3'-phosphate
  modified_base 5: mod_base = OTHER; note = guanosine-3'-phosphate
  modified_base 6: mod_base = OTHER; note = guanosine-3'-phosphate
  modified_base 7: mod_base = OTHER; note = uridine-3'-phosphate
  modified_base 8: mod_base = OTHER; note = guanosine-3'-phosphate
  modified_base 9: mod_base = OTHER; note = adenosine-3'-phosphate
  modified_base 10: mod_base = OTHER; note = adenosine-3'-phosphate
  modified_base 11: mod_base = OTHER; note = guanosine-3'-phosphate
  modified_base 12: mod_base = OTHER; note = uridine-3'-phosphate
  modified_base 13: mod_base = OTHER; note = adenosine-3'-phosphate
  modified_base 14: mod_base = OTHER; note = adenosine-3'-phosphate
  modified_base 15: mod_base = OTHER; note = guanosine-3'-phosphate
  modified_base 16: mod_base = OTHER; note = adenosine-3'-phosphate
  modified_base 17: mod_base = OTHER; note = adenosine-3'-phosphate
  modified_base 18: mod_base = OTHER; note = guanosine-3'-phosphate
  modified_base 19: mod_base = OTHER; note = adenosine-3'-phosphate
  misc_feature 1..19: note = RNA
  misc_feature 20..21: note = DNA
gccgggtgaagtaagaagatt

SEQ ID NO: 1105 - DNA, 21 bp, synthetic construct
  source 1..21: mol_type = other DNA
  modified_base 1: mod_base = OTHER; note = cytidine-3'-phosphate
  modified_base 2: mod_base = OTHER; note = uridine-3'-phosphate
  modified_base 3: mod_base = OTHER; note = uridine-3'-phosphate
  modified_base 4: mod_base = OTHER; note = cytidine-3'-phosphate
  modified_base 5: mod_base = OTHER; note = uridine-3'-phosphate
  modified_base 6: mod_base = OTHER; note = uridine-3'-phosphate
  modified_base 7: mod_base = OTHER; note = adenosine-3'-phosphate
  modified_base 8: mod_base = OTHER; note = cytidine-3'-phosphate
  modified_base 9: mod_base = OTHER; note = uridine-3'-phosphate
  modified_base 10: mod_base = OTHER; note = uridine-3'-phosphate
  modified_base 11: mod_base = OTHER; note = cytidine-3'-phosphate
  modified_base 12: mod_base = OTHER; note = adenosine-3'-phosphate
  modified_base 13: mod_base = OTHER; note = cytidine-3'-phosphate
  modified_base 14: mod_base = OTHER; note = cytidine-3'-phosphate
  modified_base 15: mod_base = OTHER; note = cytidine-3'-phosphate
  modified_base 16: mod_base = OTHER; note = guanosine-3'-phosphate
  modified_base 17: mod_base = OTHER; note = guanosine-3'-phosphate
  modified_base 18: mod_base = OTHER; note = cytidine-3'-phosphate
  modified_base 19: mod_base = OTHER; note = uridine-3'-phosphate
  misc_feature 1..19: note = RNA
  misc_feature 20..21: note = DNA
cttcttacttcacccggcttt

SEQ ID NO: 1106 - DNA, 21 bp, synthetic construct
  source 1..21: mol_type = other DNA
  modified_base 1: mod_base = OTHER; note = adenosine-3'-phosphate
  modified_base 2: mod_base = OTHER; note = guanosine-3'-phosphate
  modified_base 3: mod_base = OTHER; note = cytidine-3'-phosphate
  modified_base 4: mod_base = OTHER; note = cytidine-3'-phosphate
  modified_base 5: mod_base = OTHER; note = guanosine-3'-phosphate
  modified_base 6: mod_base = OTHER; note = guanosine-3'-phosphate
  modified_base 7: mod_base = OTHER; note = guanosine-3'-phosphate
  modified_base 8: mod_base = OTHER; note = uridine-3'-phosphate
  modified_base 9: mod_base = OTHER; note = guanosine-3'-phosphate
  modified_base 10: mod_base = OTHER; note = adenosine-3'-phosphate
  modified_base 11: mod_base = OTHER; note = adenosine-3'-phosphate
  modified_base 12: mod_base = OTHER; note = guanosine-3'-phosphate
  modified_base 13: mod_base = OTHER; note = uridine-3'-phosphate
  modified_base 14: mod_base = OTHER; note = adenosine-3'-phosphate
  modified_base 15: mod_base = OTHER; note = adenosine-3'-phosphate
  modified_base 16: mod_base = OTHER; note = guanosine-3'-phosphate
  modified_base 17: mod_base = OTHER; note = adenosine-3'-phosphate
  modified_base 18: mod_base = OTHER; note = adenosine-3'-phosphate
  modified_base 19: mod_base = OTHER; note = guanosine-3'-phosphate
  misc_feature 1..19: note = RNA
  misc_feature 20..21: note = DNA
agccgggtgaagtaagaagtt

SEQ ID NO: 1107 - DNA, 21 bp, synthetic construct
  source 1..21: mol_type = other DNA
  modified_base 1: mod_base = OTHER; note = uridine-3'-phosphate
  modified_base 2: mod_base = OTHER; note = uridine-3'-phosphate
  modified_base 3: mod_base = OTHER; note = cytidine-3'-phosphate
  modified_base 4: mod_base = OTHER; note = uridine-3'-phosphate
  modified_base 5: mod_base = OTHER; note = uridine-3'-phosphate
  modified_base 6: mod_base = OTHER; note = adenosine-3'-phosphate
  modified_base 7: mod_base = OTHER; note = cytidine-3'-phosphate
  modified_base 8: mod_base = OTHER; note = uridine-3'-phosphate
  modified_base 9: mod_base = OTHER; note = uridine-3'-phosphate
  modified_base 10: mod_base = OTHER; note = cytidine-3'-phosphate
  modified_base 11: mod_base = OTHER; note = adenosine-3'-phosphate
  modified_base 12: mod_base = OTHER; note = cytidine-3'-phosphate
  modified_base 13: mod_base = OTHER; note = cytidine-3'-phosphate
  modified_base 14: mod_base = OTHER; note = cytidine-3'-phosphate
  modified_base 15: mod_base = OTHER; note = guanosine-3'-phosphate
  modified_base 16: mod_base = OTHER; note = guanosine-3'-phosphate
  modified_base 17: mod_base = OTHER; note = cytidine-3'-phosphate
  modified_base 18: mod_base = OTHER; note = uridine-3'-phosphate
  modified_base 19: mod_base = OTHER; note = guanosine-3'-phosphate
  misc_feature 1..19: note = RNA
  misc_feature 20..21: note = DNA
ttcttacttcacccggctgtt

SEQ ID NO: 1108 - DNA, 21 bp, synthetic construct
  source 1..21: mol_type = other DNA
  modified_base 1: mod_base = OTHER; note = cytidine-3'-phosphate
  modified_base 2: mod_base = OTHER; note = adenosine-3'-phosphate
  modified_base 3: mod_base = OTHER; note = guanosine-3'-phosphate
  modified_base 4: mod_base = OTHER; note = cytidine-3'-phosphate
  modified_base 5: mod_base = OTHER; note = cytidine-3'-phosphate
  modified_base 6: mod_base = OTHER; note = guanosine-3'-phosphate
  modified_base 7: mod_base = OTHER; note = guanosine-3'-phosphate
  modified_base 8: mod_base = OTHER; note = guanosine-3'-phosphate
  modified_base 9: mod_base = OTHER; note = uridine-3'-phosphate
  modified_base 10: mod_base = OTHER; note = guanosine-3'-phosphate
  modified_base 11: mod_base = OTHER; note = adenosine-3'-phosphate
  modified_base 12: mod_base = OTHER; note = adenosine-3'-phosphate
  modified_base 13: mod_base = OTHER; note = guanosine-3'-phosphate
  modified_base 14: mod_base = OTHER; note = uridine-3'-phosphate
  modified_base 15: mod_base = OTHER; note = adenosine-3'-phosphate
  modified_base 16: mod_base = OTHER; note = adenosine-3'-phosphate
  modified_base 17: mod_base = OTHER; note = guanosine-3'-phosphate
  modified_base 18: mod_base = OTHER; note = adenosine-3'-phosphate
  modified_base 19: mod_base = OTHER; note = adenosine-3'-phosphate
  misc_feature 1..19: note = RNA
  misc_feature 20..21: note = DNA
cagccgggtgaagtaagaatt

SEQ ID NO: 1109 - DNA, 21 bp, synthetic construct
  source 1..21: mol_type = other DNA
  modified_base 1: mod_base = OTHER; note = guanosine-3'-phosphate
  modified_base 2: mod_base = OTHER; note = guanosine-3'-phosphate
  modified_base 3: mod_base = OTHER; note = guanosine-3'-phosphate
  modified_base 4: mod_base = OTHER; note = cytidine-3'-phosphate
  modified_base 5: mod_base = OTHER; note = uridine-3'-phosphate
  modified_base 6: mod_base = OTHER; note = cytidine-3'-phosphate
  modified_base 7: mod_base = OTHER; note = cytidine-3'-phosphate
  modified_base 8: mod_base = OTHER; note = uridine-3'-phosphate
  modified_base 9: mod_base = OTHER; note = cytidine-3'-phosphate
  modified_base 10: mod_base = OTHER; note = adenosine-3'-phosphate
  modified_base 11: mod_base = OTHER; note = uridine-3'-phosphate
  modified_base 12: mod_base = OTHER; note = uridine-3'-phosphate
  modified_base 13: mod_base = OTHER; note = uridine-3'-phosphate
  modified_base 14: mod_base = OTHER; note = uridine-3'-phosphate
  modified_base 15: mod_base = OTHER; note = uridine-3'-phosphate
  modified_base 16: mod_base = OTHER; note = adenosine-3'-phosphate
  modified_base 17: mod_base = OTHER; note = cytidine-3'-phosphate
  modified_base 18: mod_base = OTHER; note = guanosine-3'-phosphate
  modified_base 19: mod_base = OTHER; note = guanosine-3'-phosphate
  misc_feature 1..19: note = RNA
  misc_feature 20..21: note = DNA
gggctcctcatttttacggtt

SEQ ID NO: 1110 - DNA, 21 bp, synthetic construct
  source 1..21: mol_type = other DNA
  modified_base 1: mod_base = OTHER; note = cytidine-3'-phosphate
  modified_base 2: mod_base = OTHER; note = cytidine-3'-phosphate
  modified_base 3: mod_base = OTHER; note = guanosine-3'-phosphate
  modified_base 4: mod_base = OTHER; note = uridine-3'-phosphate
  modified_base 5: mod_base = OTHER; note = adenosine-3'-phosphate
  modified_base 6: mod_base = OTHER; note = adenosine-3'-phosphate
  modified_base 7: mod_base = OTHER; note = adenosine-3'-phosphate
  modified_base 8: mod_base = OTHER; note = adenosine-3'-phosphate
  modified_base 9: mod_base = OTHER; note = adenosine-3'-phosphate
  modified_base 10: mod_base = OTHER; note = uridine-3'-phosphate
  modified_base 11: mod_base = OTHER; note = guanosine-3'-phosphate
  modified_base 12: mod_base = OTHER; note = adenosine-3'-phosphate
  modified_base 13: mod_base = OTHER; note = guanosine-3'-phosphate
  modified_base 14: mod_base = OTHER; note = guanosine-3'-phosphate
  modified_base 15: mod_base = OTHER; note = adenosine-3'-phosphate
  modified_base 16: mod_base = OTHER; note = guanosine-3'-phosphate
  modified_base 17: mod_base = OTHER; note = cytidine-3'-phosphate
  modified_base 18: mod_base = OTHER; note = cytidine-3'-phosphate
  modified_base 19: mod_base = OTHER; note = cytidine-3'-phosphate
  misc_feature 1..19: note = RNA
  misc_feature 20..21: note = DNA
ccgtaaaaatgaggagccctt

SEQ ID NO: 1111 - DNA, 21 bp, synthetic construct
  source 1..21: mol_type = other DNA
  modified_base 1: mod_base = OTHER; note = guanosine-3'-phosphate
  modified_base 2: mod_base = OTHER; note = guanosine-3'-phosphate
  modified_base 3: mod_base = OTHER; note = cytidine-3'-phosphate
  modified_base 4: mod_base = OTHER; note = uridine-3'-phosphate
  modified_base 5: mod_base = OTHER; note = cytidine-3'-phosphate
  modified_base 6: mod_base = OTHER; note = cytidine-3'-phosphate
  modified_base 7: mod_base = OTHER; note = uridine-3'-phosphate
  modified_base 8: mod_base = OTHER; note = cytidine-3'-phosphate
  modified_base 9: mod_base = OTHER; note = adenosine-3'-phosphate
  modified_base 10: mod_base = OTHER; note = uridine-3'-phosphate
  modified_base 11: mod_base = OTHER; note = uridine-3'-phosphate
  modified_base 12: mod_base = OTHER; note = uridine-3'-phosphate
  modified_base 13: mod_base = OTHER; note = uridine-3'-phosphate
  modified_base 14: mod_base = OTHER; note = uridine-3'-phosphate
  modified_base 15: mod_base = OTHER; note = adenosine-3'-phosphate
  modified_base 16: mod_base = OTHER; note = cytidine-3'-phosphate
  modified_base 17: mod_base = OTHER; note = guanosine-3'-phosphate
  modified_base 18: mod_base = OTHER; note = guanosine-3'-phosphate
  modified_base 19: mod_base = OTHER; note = guanosine-3'-phosphate
  misc_feature 1..19: note = RNA
  misc_feature 20..21: note = DNA
ggctcctcatttttacgggtt

SEQ ID NO: 1112 - DNA, 21 bp, synthetic construct
  source 1..21: mol_type = other DNA
  modified_base 1: mod_base = OTHER; note = cytidine-3'-phosphate
  modified_base 2: mod_base = OTHER; note = cytidine-3'-phosphate
  modified_base 3: mod_base = OTHER; note = cytidine-3'-phosphate
  modified_base 4: mod_base = OTHER; note = guanosine-3'-phosphate
  modified_base 5: mod_base = OTHER; note = uridine-3'-phosphate
  modified_base 6: mod_base = OTHER; note = adenosine-3'-phosphate
  modified_base 7: mod_base = OTHER; note = adenosine-3'-phosphate
  modified_base 8: mod_base = OTHER; note = adenosine-3'-phosphate
  modified_base 9: mod_base = OTHER; note = adenosine-3'-phosphate
  modified_base 10: mod_base = OTHER; note = adenosine-3'-phosphate
  modified_base 11: mod_base = OTHER; note = uridine-3'-phosphate
  modified_base 12: mod_base = OTHER; note = guanosine-3'-phosphate
  modified_base 13: mod_base = OTHER; note = adenosine-3'-phosphate
  modified_base 14: mod_base = OTHER; note = guanosine-3'-phosphate
  modified_base 15: mod_base = OTHER; note = guanosine-3'-phosphate
  modified_base 16: mod_base = OTHER; note = adenosine-3'-phosphate
  modified_base 17: mod_base = OTHER; note = guanosine-3'-phosphate
  modified_base 18: mod_base = OTHER; note = cytidine-3'-phosphate
  modified_base 19: mod_base = OTHER; note = cytidine-3'-phosphate
  misc_feature 1..19: note = RNA
  misc_feature 20..21: note = DNA
cccgtaaaaatgaggagcctt

SEQ ID NO: 1113 - DNA, 21 bp, synthetic construct
  source 1..21: mol_type = other DNA
  modified_base 1: mod_base = OTHER; note = guanosine-3'-phosphate
  modified_base 2: mod_base = OTHER; note = cytidine-3'-phosphate
  modified_base 3: mod_base = OTHER; note = uridine-3'-phosphate
  modified_base 4: mod_base = OTHER; note = cytidine-3'-phosphate
  modified_base 5: mod_base = OTHER; note = cytidine-3'-phosphate
  modified_base 6: mod_base = OTHER; note = uridine-3'-phosphate
  modified_base 7: mod_base = OTHER; note = cytidine-3'-phosphate
  modified_base 8: mod_base = OTHER; note = adenosine-3'-phosphate
  modified_base 9: mod_base = OTHER; note = uridine-3'-phosphate
  modified_base 10: mod_base = OTHER; note = uridine-3'-phosphate
  modified_base 11: mod_base = OTHER; note = uridine-3'-phosphate
  modified_base 12: mod_base = OTHER; note = uridine-3'-phosphate
  modified_base 13: mod_base = OTHER; note = uridine-3'-phosphate
  modified_base 14: mod_base = OTHER; note = adenosine-3'-phosphate
  modified_base 15: mod_base = OTHER; note = cytidine-3'-phosphate
  modified_base 16: mod_base = OTHER; note = guanosine-3'-phosphate
  modified_base 17: mod_base = OTHER; note = guanosine-3'-phosphate
  modified_base 18: mod_base = OTHER; note = guanosine-3'-phosphate
  modified_base 19: mod_base = OTHER; note = uridine-3'-phosphate
  misc_feature 1..19: note = RNA
  misc_feature 20..21: note = DNA
gctcctcatttttacgggttt

SEQ ID NO: 1114 - DNA, 21 bp, synthetic construct
  source 1..21: mol_type = other DNA
  modified_base 1: mod_base = OTHER; note = adenosine-3'-phosphate
  modified_base 2: mod_base = OTHER; note = cytidine-3'-phosphate
  modified_base 3: mod_base = OTHER; note = cytidine-3'-phosphate
  modified_base 4: mod_base = OTHER; note = cytidine-3'-phosphate
  modified_base 5: mod_base = OTHER; note = guanosine-3'-phosphate
  modified_base 6: mod_base = OTHER; note = uridine-3'-phosphate
  modified_base 7: mod_base = OTHER; note = adenosine-3'-phosphate
  modified_base 8: mod_base = OTHER; note = adenosine-3'-phosphate
  modified_base 9: mod_base = OTHER; note = adenosine-3'-phosphate
  modified_base 10: mod_base = OTHER; note = adenosine-3'-phosphate
  modified_base 11: mod_base = OTHER; note = adenosine-3'-phosphate
  modified_base 12: mod_base = OTHER; note = uridine-3'-phosphate
  modified_base 13: mod_base = OTHER; note = guanosine-3'-phosphate
  modified_base 14: mod_base = OTHER; note = adenosine-3'-phosphate
  modified_base 15: mod_base = OTHER; note = guanosine-3'-phosphate
  modified_base 16: mod_base = OTHER; note = guanosine-3'-phosphate
  modified_base 17: mod_base = OTHER; note = adenosine-3'-phosphate
  modified_base 18: mod_base = OTHER; note = guanosine-3'-phosphate
  modified_base 19: mod_base = OTHER; note = cytidine-3'-phosphate
  misc_feature 1..19: note = RNA
  misc_feature 20..21: note = DNA
acccgtaaaaatgaggagctt

SEQ ID NO: 1115 - DNA, 21 bp, synthetic construct
  source 1..21: mol_type = other DNA
  modified_base 1: mod_base = OTHER; note = cytidine-3'-phosphate
  modified_base 2: mod_base = OTHER; note = uridine-3'-phosphate
  modified_base 3: mod_base = OTHER; note = cytidine-3'-phosphate
  modified_base 4: mod_base = OTHER; note = cytidine-3'-phosphate
  modified_base 5: mod_base = OTHER; note = uridine-3'-phosphate
  modified_base 6: mod_base = OTHER; note = cytidine-3'-phosphate
  modified_base 7: mod_base = OTHER; note = adenosine-3'-phosphate
  modified_base 8: mod_base = OTHER; note = uridine-3'-phosphate
  modified_base 9: mod_base = OTHER; note = uridine-3'-phosphate
  modified_base 10: mod_base = OTHER; note = uridine-3'-phosphate
  modified_base 11: mod_base = OTHER; note = uridine-3'-phosphate
  modified_base 12: mod_base = OTHER; note = uridine-3'-phosphate
  modified_base 13: mod_base = OTHER; note = adenosine-3'-phosphate
  modified_base 14: mod_base = OTHER; note = cytidine-3'-phosphate
  modified_base 15: mod_base = OTHER; note = guanosine-3'-phosphate
  modified_base 16: mod_base = OTHER; note = guanosine-3'-phosphate
  modified_base 17: mod_base = OTHER; note = guanosine-3'-phosphate
  modified_base 18: mod_base = OTHER; note = uridine-3'-phosphate
  modified_base 19: mod_base = OTHER; note = adenosine-3'-phosphate
  misc_feature 1..19: note = RNA
  misc_feature 20..21: note = DNA
ctcctcatttttacgggtatt

SEQ ID NO: 1116 - DNA, 21 bp, synthetic construct
  source 1..21: mol_type = other DNA
  modified_base 1: mod_base = OTHER; note = uridine-3'-phosphate
  modified_base 2: mod_base = OTHER; note = adenosine-3'-phosphate
  modified_base 3: mod_base = OTHER; note = cytidine-3'-phosphate
  modified_base 4: mod_base = OTHER; note = cytidine-3'-phosphate
  modified_base 5: mod_base = OTHER; note = cytidine-3'-phosphate
  modified_base 6: mod_base = OTHER; note = guanosine-3'-phosphate
  modified_base 7: mod_base = OTHER; note = uridine-3'-phosphate
  modified_base 8: mod_base = OTHER; note = adenosine-3'-phosphate
  modified_base 9: mod_base = OTHER; note = adenosine-3'-phosphate
  modified_base 10: mod_base = OTHER; note = adenosine-3'-phosphate
  modified_base 11: mod_base = OTHER; note = adenosine-3'-phosphate
  modified_base 12: mod_base = OTHER; note = adenosine-3'-phosphate
  modified_base 13: mod_base = OTHER; note = uridine-3'-phosphate
  modified_base 14: mod_base = OTHER; note = guanosine-3'-phosphate
  modified_base 15: mod_base = OTHER; note = adenosine-3'-phosphate
  modified_base 16: mod_base = OTHER; note = guanosine-3'-phosphate
  modified_base 17: mod_base = OTHER; note = guanosine-3'-phosphate
  modified_base 18: mod_base = OTHER; note = adenosine-3'-phosphate
  modified_base 19: mod_base = OTHER; note = guanosine-3'-phosphate
  misc_feature 1..19: note = RNA
  misc_feature 20..21: note = DNA
tacccgtaaaaatgaggagtt

SEQ ID NO: 1117 - DNA, 21 bp, synthetic construct
  source 1..21: mol_type = other DNA
  modified_base 1: mod_base = OTHER; note = uridine-3'-phosphate
  modified_base 2: mod_base = OTHER; note = cytidine-3'-phosphate
  modified_base 3: mod_base = OTHER; note = cytidine-3'-phosphate
  modified_base 4: mod_base = OTHER; note = uridine-3'-phosphate
  modified_base 5: mod_base = OTHER; note = cytidine-3'-phosphate
  modified_base 6: mod_base = OTHER; note = adenosine-3'-phosphate
  modified_base 7: mod_base = OTHER; note = uridine-3'-phosphate
  modified_base 8: mod_base = OTHER; note = uridine-3'-phosphate
  modified_base 9: mod_base = OTHER; note = uridine-3'-phosphate
  modified_base 10: mod_base = OTHER; note = uridine-3'-phosphate
  modified_base 11: mod_base = OTHER; note = uridine-3'-phosphate
  modified_base 12: mod_base = OTHER; note = adenosine-3'-phosphate
  modified_base 13: mod_base = OTHER; note = cytidine-3'-phosphate
  modified_base 14: mod_base = OTHER; note = guanosine-3'-phosphate
  modified_base 15: mod_base = OTHER; note = guanosine-3'-phosphate
  modified_base 16: mod_base = OTHER; note = guanosine-3'-phosphate
  modified_base 17: mod_base = OTHER; note = uridine-3'-phosphate
  modified_base 18: mod_base = OTHER; note = adenosine-3'-phosphate
  modified_base 19: mod_base = OTHER; note = adenosine-3'-phosphate
  misc_feature 1..19: note = RNA
  misc_feature 20..21: note = DNA
tcctcatttttacgggtaatt

SEQ ID NO: 1118 - DNA, 21 bp, synthetic construct
  source 1..21: mol_type = other DNA
  modified_base 1: mod_base = OTHER; note = uridine-3'-phosphate
  modified_base 2: mod_base = OTHER; note = uridine-3'-phosphate
  modified_base 3: mod_base = OTHER; note = adenosine-3'-phosphate
  modified_base 4: mod_base = OTHER; note = cytidine-3'-phosphate
  modified_base 5: mod_base = OTHER; note = cytidine-3'-phosphate
  modified_base 6: mod_base = OTHER; note = cytidine-3'-phosphate
  modified_base 7: mod_base = OTHER; note = guanosine-3'-phosphate
  modified_base 8: mod_base = OTHER; note = uridine-3'-phosphate
  modified_base 9: mod_base = OTHER; note = adenosine-3'-phosphate
  modified_base 10: mod_base = OTHER; note = adenosine-3'-phosphate
  modified_base 11: mod_base = OTHER; note = adenosine-3'-phosphate
  modified_base 12: mod_base = OTHER; note = adenosine-3'-phosphate
  modified_base 13: mod_base = OTHER; note = adenosine-3'-phosphate
  modified_base 14: mod_base = OTHER; note = uridine-3'-phosphate
  modified_base 15: mod_base = OTHER; note = guanosine-3'-phosphate
  modified_base 16: mod_base = OTHER; note = adenosine-3'-phosphate
  modified_base 17: mod_base = OTHER; note = guanosine-3'-phosphate
  modified_base 18: mod_base = OTHER; note = guanosine-3'-phosphate
  modified_base 19: mod_base = OTHER; note = adenosine-3'-phosphate
  misc_feature 1..19: note = RNA
  misc_feature 20..21: note = DNA
ttacccgtaaaaatgaggatt

SEQ ID NO: 1119 - DNA, 21 bp, synthetic construct
  source 1..21: mol_type = other DNA
  modified_base 1: mod_base = OTHER; note = cytidine-3'-phosphate
  modified_base 2: mod_base = OTHER; note = cytidine-3'-phosphate
  modified_base 3: mod_base = OTHER; note = uridine-3'-phosphate
  modified_base 4: mod_base = OTHER; note = cytidine-3'-phosphate
  modified_base 5: mod_base = OTHER; note = adenosine-3'-phosphate
  modified_base 6: mod_base = OTHER; note = uridine-3'-phosphate
  modified_base 7: mod_base = OTHER; note = uridine-3'-phosphate
  modified_base 8: mod_base = OTHER; note = uridine-3'-phosphate
  modified_base 9: mod_base = OTHER; note = uridine-3'-phosphate
  modified_base 10: mod_base = OTHER; note = uridine-3'-phosphate
  modified_base 11: mod_base = OTHER; note = adenosine-3'-phosphate
  modified_base 12: mod_base = OTHER; note = cytidine-3'-phosphate
  modified_base 13: mod_base = OTHER; note = guanosine-3'-phosphate
  modified_base 14: mod_base = OTHER; note = guanosine-3'-phosphate
  modified_base 15: mod_base = OTHER; note = guanosine-3'-phosphate
  modified_base 16: mod_base = OTHER; note = uridine-3'-phosphate
  modified_base 17: mod_base = OTHER; note = adenosine-3'-phosphate
  modified_base 18: mod_base = OTHER; note = adenosine-3'-phosphate
  modified_base 19: mod_base = OTHER; note = cytidine-3'-phosphate
  misc_feature 1..19: note = RNA
  misc_feature 20..21: note = DNA
cctcatttttacgggtaactt

SEQ ID NO: 1120 - DNA, 21 bp, synthetic construct
  source 1..21: mol_type = other DNA
  modified_base 1: mod_base = OTHER; note = guanosine-3'-phosphate
  modified_base 2: mod_base = OTHER; note = uridine-3'-phosphate
  modified_base 3: mod_base = OTHER; note = uridine-3'-phosphate
  modified_base 4: mod_base = OTHER; note = adenosine-3'-phosphate
  modified_base 5: mod_base = OTHER; note = cytidine-3'-phosphate
  modified_base 6: mod_base = OTHER; note = cytidine-3'-phosphate
  modified_base 7: mod_base = OTHER; note = cytidine-3'-phosphate
  modified_base 8: mod_base = OTHER; note = guanosine-3'-phosphate
  modified_base 9: mod_base = OTHER; note = uridine-3'-phosphate
  modified_base 10: mod_base = OTHER; note = adenosine-3'-phosphate
  modified_base 11: mod_base = OTHER; note = adenosine-3'-phosphate
  modified_base 12: mod_base = OTHER; note = adenosine-3'-phosphate
  modified_base 13: mod_base = OTHER; note = adenosine-3'-phosphate
  modified_base 14: mod_base = OTHER; note = adenosine-3'-phosphate
  modified_base 15: mod_base = OTHER; note = uridine-3'-phosphate
  modified_base 16: mod_base = OTHER; note = guanosine-3'-phosphate
  modified_base 17: mod_base = OTHER; note = adenosine-3'-phosphate
  modified_base 18: mod_base = OTHER; note = guanosine-3'-phosphate
  modified_base 19: mod_base = OTHER; note = guanosine-3'-phosphate
  misc_feature 1..19: note = RNA
  misc_feature 20..21: note = DNA
gttacccgtaaaaatgaggtt

SEQ ID NO: 1121 - DNA, 21 bp, synthetic construct
  source 1..21: mol_type = other DNA
  modified_base 1: mod_base = OTHER; note = cytidine-3'-phosphate
  modified_base 2: mod_base = OTHER; note = uridine-3'-phosphate
  modified_base 3: mod_base = OTHER; note = cytidine-3'-phosphate
  modified_base 4: mod_base = OTHER; note = adenosine-3'-phosphate
  modified_base 5: mod_base = OTHER; note = uridine-3'-phosphate
  modified_base 6: mod_base = OTHER; note = uridine-3'-phosphate
  modified_base 7: mod_base = OTHER; note = uridine-3'-phosphate
  modified_base 8: mod_base = OTHER; note = uridine-3'-phosphate
  modified_base 9: mod_base = OTHER; note = uridine-3'-phosphate
  modified_base 10: mod_base = OTHER; note = adenosine-3'-phosphate
  modified_base 11: mod_base = OTHER; note = cytidine-3'-phosphate
  modified_base 12: mod_base = OTHER; note = guanosine-3'-phosphate
  modified_base 13: mod_base = OTHER; note = guanosine-3'-phosphate
  modified_base 14: mod_base = OTHER; note = guanosine-3'-phosphate
  modified_base 15: mod_base = OTHER; note = uridine-3'-phosphate
  modified_base 16: mod_base = OTHER; note = adenosine-3'-phosphate
  modified_base 17: mod_base = OTHER; note = adenosine-3'-phosphate
  modified_base 18: mod_base = OTHER; note = cytidine-3'-phosphate
  modified_base 19: mod_base = OTHER; note = adenosine-3'-phosphate
  misc_feature 1..19: note = RNA
  misc_feature 20..21: note = DNA
ctcatttttacgggtaacatt

SEQ ID NO: 1122 - DNA, 21 bp, synthetic construct
  source 1..21: mol_type = other DNA
  modified_base 1: mod_base = OTHER; note = uridine-3'-phosphate
  modified_base 2: mod_base = OTHER; note = guanosine-3'-phosphate
  modified_base 3: mod_base = OTHER; note = uridine-3'-phosphate
  modified_base 4: mod_base = OTHER; note = uridine-3'-phosphate
  modified_base 5: mod_base = OTHER; note = adenosine-3'-phosphate
  modified_base 6: mod_base = OTHER; note = cytidine-3'-phosphate
  modified_base 7: mod_base = OTHER; note = cytidine-3'-phosphate
  modified_base 8: mod_base = OTHER; note = cytidine-3'-phosphate
  modified_base 9: mod_base = OTHER; note = guanosine-3'-phosphate
  modified_base 10: mod_base = OTHER; note = uridine-3'-phosphate
  modified_base 11: mod_base = OTHER; note = adenosine-3'-phosphate
  modified_base 12: mod_base = OTHER; note = adenosine-3'-phosphate
  modified_base 13: mod_base = OTHER; note = adenosine-3'-phosphate
  modified_base 14: mod_base = OTHER; note = adenosine-3'-phosphate
  modified_base 15: mod_base = OTHER; note = adenosine-3'-phosphate
  modified_base 16: mod_base = OTHER; note = uridine-3'-phosphate
  modified_base 17: mod_base = OTHER; note = guanosine-3'-phosphate
  modified_base 18: mod_base = OTHER; note = adenosine-3'-phosphate
  modified_base 19: mod_base = OTHER; note = guanosine-3'-phosphate
  misc_feature 1..19: note = RNA
  misc_feature 20..21: note = DNA
tgttacccgtaaaaatgagtt

SEQ ID NO: 1123 - DNA, 21 bp, synthetic construct
  source 1..21: mol_type = other DNA
  modified_base 1: mod_base = OTHER; note = cytidine-3'-phosphate
  modified_base 2: mod_base = OTHER; note = adenosine-3'-phosphate
  modified_base 3: mod_base = OTHER; note = uridine-3'-phosphate
  modified_base 4: mod_base = OTHER; note = uridine-3'-phosphate
  modified_base 5: mod_base = OTHER; note = uridine-3'-phosphate
  modified_base 6: mod_base = OTHER; note = uridine-3'-phosphate
  modified_base 7: mod_base = OTHER; note = uridine-3'-phosphate
  modified_base 8: mod_base = OTHER; note = adenosine-3'-phosphate
  modified_base 9: mod_base = OTHER; note = cytidine-3'-phosphate
  modified_base 10: mod_base = OTHER; note = guanosine-3'-phosphate
  modified_base 11: mod_base = OTHER; note = guanosine-3'-phosphate
  modified_base 12: mod_base = OTHER; note = guanosine-3'-phosphate
  modified_base 13: mod_base = OTHER; note = uridine-3'-phosphate
  modified_base 14: mod_base = OTHER; note = adenosine-3'-phosphate
  modified_base 15: mod_base = OTHER; note = adenosine-3'-phosphate
  modified_base 16: mod_base = OTHER; note = cytidine-3'-phosphate
  modified_base 17: mod_base = OTHER; note = adenosine-3'-phosphate
  modified_base 18: mod_base = OTHER; note = guanosine-3'-phosphate
  modified_base 19: mod_base = OTHER; note = uridine-3'-phosphate
  misc_feature 1..19: note = RNA
  misc_feature 20..21: note = DNA
catttttacgggtaacagttt

SEQ ID NO: 1124 - DNA, 21 bp, synthetic construct
  source 1..21: mol_type = other DNA
  modified_base 1: mod_base = OTHER; note = adenosine-3'-phosphate
  modified_base 2: mod_base = OTHER; note = cytidine-3'-phosphate
  modified_base 3: mod_base = OTHER; note = uridine-3'-phosphate
  modified_base 4: mod_base = OTHER; note = guanosine-3'-phosphate
  modified_base 5: mod_base = OTHER; note = uridine-3'-phosphate
  modified_base 6: mod_base = OTHER; note = uridine-3'-phosphate
  modified_base 7: mod_base = OTHER; note = adenosine-3'-phosphate
  modified_base 8: mod_base = OTHER; note = cytidine-3'-phosphate
  modified_base 9: mod_base = OTHER; note = cytidine-3'-phosphate
  modified_base 10: mod_base = OTHER; note = cytidine-3'-phosphate
  modified_base 11: mod_base = OTHER; note = guanosine-3'-phosphate
  modified_base 12: mod_base = OTHER; note = uridine-3'-phosphate
  modified_base 13: mod_base = OTHER; note = adenosine-3'-phosphate
  modified_base 14: mod_base = OTHER; note = adenosine-3'-phosphate
  modified_base 15: mod_base = OTHER; note = adenosine-3'-phosphate
  modified_base 16: mod_base = OTHER; note = adenosine-3'-phosphate
  modified_base 17: mod_base = OTHER; note = adenosine-3'-phosphate
  modified_base 18: mod_base = OTHER; note = uridine-3'-phosphate
  modified_base 19: mod_base = OTHER; note = guanosine-3'-phosphate
  misc_feature 1..19: note = RNA
  misc_feature 20..21: note = DNA
actgttacccgtaaaaatgtt

SEQ ID NO: 1125 - DNA, 21 bp, synthetic construct
  source 1..21: mol_type = other DNA
  modified_base 1: mod_base = OTHER; note = adenosine-3'-phosphate
  modified_base 2: mod_base = OTHER; note = uridine-3'-phosphate
  modified_base 3: mod_base = OTHER; note = uridine-3'-phosphate
  modified_base 4: mod_base = OTHER; note = uridine-3'-phosphate
  modified_base 5: mod_base = OTHER; note = uridine-3'-phosphate
  modified_base 6: mod_base = OTHER; note = uridine-3'-phosphate
  modified_base 7: mod_base = OTHER; note = adenosine-3'-phosphate
  modified_base 8: mod_base = OTHER; note = cytidine-3'-phosphate
  modified_base 9: mod_base = OTHER; note = guanosine-3'-phosphate
  modified_base 10: mod_base = OTHER; note = guanosine-3'-phosphate
  modified_base 11: mod_base = OTHER; note = guanosine-3'-phosphate
  modified_base 12: mod_base = OTHER; note = uridine-3'-phosphate
  modified_base 13: mod_base = OTHER; note = adenosine-3'-phosphate
  modified_base 14: mod_base = OTHER; note = adenosine-3'-phosphate
  modified_base 15: mod_base = OTHER; note = cytidine-3'-phosphate
  modified_base 16: mod_base = OTHER; note = adenosine-3'-phosphate
  modified_base 17: mod_base = OTHER; note = guanosine-3'-phosphate
  modified_base 18: mod_base = OTHER; note = uridine-3'-phosphate
  modified_base 19: mod_base = OTHER; note = guanosine-3'-phosphate
  misc_feature 1..19: note = RNA
  misc_feature 20..21: note = DNA
atttttacgggtaacagtgtt

SEQ ID NO: 1126 - DNA, 21 bp, synthetic construct
  source 1..21: mol_type = other DNA
  modified_base 1: mod_base = OTHER; note = cytidine-3'-phosphate
  modified_base 2: mod_base = OTHER; note = adenosine-3'-phosphate
  modified_base 3: mod_base = OTHER; note = cytidine-3'-phosphate
  modified_base 4: mod_base = OTHER; note = uridine-3'-phosphate
  modified_base 5: mod_base = OTHER; note = guanosine-3'-phosphate
  modified_base 6: mod_base = OTHER; note = uridine-3'-phosphate
  modified_base 7: mod_base = OTHER; note = uridine-3'-phosphate
  modified_base 8: mod_base = OTHER; note = adenosine-3'-phosphate
  modified_base 9: mod_base = OTHER; note = cytidine-3'-phosphate
  modified_base 10: mod_base = OTHER; note = cytidine-3'-phosphate
  modified_base 11: mod_base = OTHER; note = cytidine-3'-phosphate
  modified_base 12: mod_base = OTHER; note = guanosine-3'-phosphate
  modified_base 13: mod_base = OTHER; note = uridine-3'-phosphate
  modified_base 14: mod_base = OTHER; note = adenosine-3'-phosphate
  modified_base 15: mod_base = OTHER; note = adenosine-3'-phosphate
  modified_base 16: mod_base = OTHER; note = adenosine-3'-phosphate
  modified_base 17: mod_base = OTHER; note = adenosine-3'-phosphate
  modified_base 18: mod_base = OTHER; note = adenosine-3'-phosphate
  modified_base 19: mod_base = OTHER; note = uridine-3'-phosphate
  misc_feature 1..19: note = RNA
  misc_feature 20..21: note = DNA
cactgttacccgtaaaaattt

SEQ ID NO: 1127 - DNA, 21 bp, synthetic construct
  source 1..21: mol_type = other DNA
  modified_base 1: mod_base = OTHER; note = uridine-3'-phosphate
  modified_base 2: mod_base = OTHER; note = uridine-3'-phosphate
  modified_base 3: mod_base = OTHER; note = uridine-3'-phosphate
  modified_base 4: mod_base = OTHER; note = adenosine-3'-phosphate
  modified_base 5: mod_base = OTHER; note = cytidine-3'-phosphate
  modified_base 6: mod_base = OTHER; note = guanosine-3'-phosphate
  modified_base 7: mod_base = OTHER; note = guanosine-3'-phosphate
  modified_base 8: mod_base = OTHER; note = guanosine-3'-phosphate
  modified_base 9: mod_base = OTHER; note = uridine-3'-phosphate
  modified_base 10: mod_base = OTHER; note = adenosine-3'-phosphate
  modified_base 11: mod_base = OTHER; note = adenosine-3'-phosphate
  modified_base 12: mod_base = OTHER; note = cytidine-3'-phosphate
  modified_base 13: mod_base = OTHER; note = adenosine-3'-phosphate
  modified_base 14: mod_base = OTHER; note = guanosine-3'-phosphate
  modified_base 15: mod_base = OTHER; note = uridine-3'-phosphate
  modified_base 16: mod_base = OTHER; note = guanosine-3'-phosphate
  modified_base 17: mod_base = OTHER; note = adenosine-3'-phosphate
  modified_base 18: mod_base = OTHER; note = guanosine-3'-phosphate
  modified_base 19: mod_base = OTHER; note = guanosine-3'-phosphate
  misc_feature 1..19: note = RNA
  misc_feature 20..21: note = DNA
tttacgggtaacagtgaggtt

SEQ ID NO: 1128 - DNA, 21 bp, synthetic construct
  source 1..21: mol_type = other DNA
  modified_base 1: mod_base = OTHER; note = cytidine-3'-phosphate
  modified_base 2: mod_base = OTHER; note = cytidine-3'-phosphate
  modified_base 3: mod_base = OTHER; note = uridine-3'-phosphate
  modified_base 4: mod_base = OTHER; note = cytidine-3'-phosphate
  modified_base 5: mod_base = OTHER; note = adenosine-3'-phosphate
  modified_base 6: mod_base = OTHER; note = cytidine-3'-phosphate
  modified_base 7: mod_base = OTHER; note = uridine-3'-phosphate
  modified_base 8: mod_base = OTHER; note = guanosine-3'-phosphate
  modified_base 9: mod_base = OTHER; note = uridine-3'-phosphate
  modified_base 10: mod_base = OTHER; note = uridine-3'-phosphate
  modified_base 11: mod_base = OTHER; note = adenosine-3'-phosphate
  modified_base 12: mod_base = OTHER; note = cytidine-3'-phosphate
  modified_base 13: mod_base = OTHER; note = cytidine-3'-phosphate
  modified_base 14: mod_base = OTHER; note = cytidine-3'-phosphate
  modified_base 15: mod_base = OTHER; note = guanosine-3'-phosphate
  modified_base 16: mod_base = OTHER; note = uridine-3'-phosphate
  modified_base 17: mod_base = OTHER; note = adenosine-3'-phosphate
  modified_base 18: mod_base = OTHER; note = adenosine-3'-phosphate
  modified_base 19: mod_base = OTHER; note = adenosine-3'-phosphate
  misc_feature 1..19: note = RNA
  misc_feature 20..21: note = DNA
cctcactgttacccgtaaatt

SEQ ID NO: 1129 - DNA, 21 bp, synthetic construct
  source 1..21: mol_type = other DNA
  modified_base 1: mod_base = OTHER; note = cytidine-3'-phosphate
  modified_base 2: mod_base = OTHER; note = adenosine-3'-phosphate
  modified_base 3: mod_base = OTHER; note = guanosine-3'-phosphate
  modified_base 4: mod_base = OTHER; note = adenosine-3'-phosphate
  modified_base 5: mod_base = OTHER; note = cytidine-3'-phosphate
  modified_base 6: mod_base = OTHER; note = cytidine-3'-phosphate
  modified_base 7: mod_base = OTHER; note = adenosine-3'-phosphate
  modified_base 8: mod_base = OTHER; note = guanosine-3'-phosphate
  modified_base 9: mod_base = OTHER; note = guanosine-3'-phosphate
  modified_base 10: mod_base = OTHER; note = adenosine-3'-phosphate
  modified_base 11: mod_base = OTHER; note = adenosine-3'-phosphate
  modified_base 12: mod_base = OTHER; note = guanosine-3'-phosphate
  modified_base 13: mod_base = OTHER; note = cytidine-3'-phosphate
  modified_base 14: mod_base = OTHER; note = uridine-3'-phosphate
  modified_base 15: mod_base = OTHER; note = cytidine-3'-phosphate
  modified_base 16: mod_base = OTHER; note = guanosine-3'-phosphate
  modified_base 17: mod_base = OTHER; note = guanosine-3'-phosphate
  modified_base 18: mod_base = OTHER; note = uridine-3'-phosphate
  modified_base 19: mod_base = OTHER; note = guanosine-3'-phosphate
  misc_feature 1..19: note = RNA
  misc_feature 20..21: note = DNA
cagaccaggaagctcggtgtt

SEQ ID NO: 1130 - DNA, 21 bp, synthetic construct
  source 1..21: mol_type = other DNA
  modified_base 1: mod_base = OTHER; note = cytidine-3'-phosphate
  modified_base 2: mod_base = OTHER; note = adenosine-3'-phosphate
  modified_base 3: mod_base = OTHER; note = cytidine-3'-phosphate
  modified_base 4: mod_base = OTHER; note = cytidine-3'-phosphate
  modified_base 5: mod_base = OTHER; note = guanosine-3'-phosphate
  modified_base 6: mod_base = OTHER; note = adenosine-3'-phosphate
  modified_base 7: mod_base = OTHER; note = guanosine-3'-phosphate
  modified_base 8: mod_base = OTHER; note = cytidine-3'-phosphate
  modified_base 9: mod_base = OTHER; note = uridine-3'-phosphate
  modified_base 10: mod_base = OTHER; note = uridine-3'-phosphate
  modified_base 11: mod_base = OTHER; note = cytidine-3'-phosphate
  modified_base 12: mod_base = OTHER; note = cytidine-3'-phosphate
  modified_base 13: mod_base = OTHER; note = uridine-3'-phosphate
  modified_base 14: mod_base = OTHER; note = guanosine-3'-phosphate
  modified_base 15: mod_base = OTHER; note = guanosine-3'-phosphate
  modified_base 16: mod_base = OTHER; note = uridine-3'-phosphate
  modified_base 17: mod_base = OTHER; note = cytidine-3'-phosphate
  modified_base 18: mod_base = OTHER; note = uridine-3'-phosphate
  modified_base 19: mod_base = OTHER; note = guanosine-3'-phosphate
  misc_feature 1..19: note = RNA
  misc_feature 20..21: note = DNA
caccgagcttcctggtctgtt

SEQ ID NO: 1131 - DNA, 21 bp, synthetic construct
  source 1..21: mol_type = other DNA
  modified_base 1: mod_base = OTHER; note = guanosine-3'-phosphate
  modified_base 2: mod_base = OTHER; note = adenosine-3'-phosphate
  modified_base 3: mod_base = OTHER; note = cytidine-3'-phosphate
  modified_base 4: mod_base = OTHER; note = cytidine-3'-phosphate
  modified_base 5: mod_base = OTHER; note = adenosine-3'-phosphate
  modified_base 6: mod_base = OTHER; note = guanosine-3'-phosphate
  modified_base 7: mod_base = OTHER; note = guanosine-3'-phosphate
  modified_base 8: mod_base = OTHER; note = adenosine-3'-phosphate
  modified_base 9: mod_base = OTHER; note = adenosine-3'-phosphate
  modified_base 10: mod_base = OTHER; note = guanosine-3'-phosphate
  modified_base 11: mod_base = OTHER; note = cytidine-3'-phosphate
  modified_base 12: mod_base = OTHER; note = uridine-3'-phosphate
  modified_base 13: mod_base = OTHER; note = cytidine-3'-phosphate
  modified_base 14: mod_base = OTHER; note = guanosine-3'-phosphate
  modified_base 15: mod_base = OTHER; note = guanosine-3'-phosphate
  modified_base 16: mod_base = OTHER; note = uridine-3'-phosphate
  modified_base 17: mod_base = OTHER; note = guanosine-3'-phosphate
  modified_base 18: mod_base = OTHER; note = adenosine-3'-phosphate
  modified_base 19: mod_base = OTHER; note = guanosine-3'-phosphate
  misc_feature 1..19: note = RNA
  misc_feature 20..21: note = DNA
gaccaggaagctcggtgagtt

SEQ ID NO: 1132 - DNA, 21 bp, synthetic construct
  source 1..21: mol_type = other DNA
  modified_base 1: mod_base = OTHER; note = cytidine-3'-phosphate
  modified_base 2: mod_base = OTHER; note = uridine-3'-phosphate
  modified_base 3: mod_base = OTHER; note = cytidine-3'-phosphate
  modified_base 4: mod_base = OTHER; note = adenosine-3'-phosphate
  modified_base 5: mod_base = OTHER; note = cytidine-3'-phosphate
  modified_base 6: mod_base = OTHER; note = cytidine-3'-phosphate
  modified_base 7: mod_base = OTHER; note = guanosine-3'-phosphate
  modified_base 8: mod_base = OTHER; note = adenosine-3'-phosphate
  modified_base 9: mod_base = OTHER; note = guanosine-3'-phosphate
  modified_base 10: mod_base = OTHER; note = cytidine-3'-phosphate
  modified_base 11: mod_base = OTHER; note = uridine-3'-phosphate
  modified_base 12: mod_base = OTHER; note = uridine-3'-phosphate
  modified_base 13: mod_base = OTHER; note = cytidine-3'-phosphate
  modified_base 14: mod_base = OTHER; note = cytidine-3'-phosphate
  modified_base 15: mod_base = OTHER; note = uridine-3'-phosphate
  modified_base 16: mod_base = OTHER; note = guanosine-3'-phosphate
  modified_base 17: mod_base = OTHER; note = guanosine-3'-phosphate
  modified_base 18: mod_base = OTHER; note = uridine-3'-phosphate
  modified_base 19: mod_base = OTHER; note = cytidine-3'-phosphate
  misc_feature 1..19: note = RNA
  misc_feature 20..21: note = DNA
ctcaccgagcttcctggtctt

SEQ ID NO: 1133 - DNA, 21 bp, synthetic construct
  source 1..21: mol_type = other DNA
  modified_base 1: mod_base = OTHER; note = cytidine-3'-phosphate
  modified_base 2: mod_base = OTHER; note = cytidine-3'-phosphate
  modified_base 3: mod_base = OTHER; note = adenosine-3'-phosphate
  modified_base 4: mod_base = OTHER; note = guanosine-3'-phosphate
  modified_base 5: mod_base = OTHER; note = guanosine-3'-phosphate
  modified_base 6: mod_base = OTHER; note = adenosine-3'-phosphate
  modified_base 7: mod_base = OTHER; note = adenosine-3'-phosphate
  modified_base 8: mod_base = OTHER; note = guanosine-3'-phosphate
  modified_base 9: mod_base = OTHER; note = cytidine-3'-phosphate
  modified_base 10: mod_base = OTHER; note = uridine-3'-phosphate
  modified_base 11: mod_base = OTHER; note = cytidine-3'-phosphate
  modified_base 12: mod_base = OTHER; note = guanosine-3'-phosphate
  modified_base 13: mod_base = OTHER; note = guanosine-3'-phosphate
  modified_base 14: mod_base = OTHER; note = uridine-3'-phosphate
  modified_base 15: mod_base = OTHER; note = guanosine-3'-phosphate
  modified_base 16: mod_base = OTHER; note = adenosine-3'-phosphate
  modified_base 17: mod_base = OTHER; note = guanosine-3'-phosphate
  modified_base 18: mod_base = OTHER; note = uridine-3'-phosphate
  modified_base 19: mod_base = OTHER; note = guanosine-3'-phosphate
  misc_feature 1..19: note = RNA
  misc_feature 20..21: note = DNA
ccaggaagctcggtgagtgtt

SEQ ID NO: 1134 - DNA, 21 bp, synthetic construct
  source 1..21: mol_type = other DNA
  modified_base 1: mod_base = OTHER; note = cytidine-3'-phosphate
  modified_base 2: mod_base = OTHER; note = adenosine-3'-phosphate
  modified_base 3: mod_base = OTHER; note = cytidine-3'-phosphate
  modified_base 4: mod_base = OTHER; note = uridine-3'-phosphate
  modified_base 5: mod_base = OTHER; note = cytidine-3'-phosphate
  modified_base 6: mod_base = OTHER; note = adenosine-3'-phosphate
  modified_base 7: mod_base = OTHER; note = cytidine-3'-phosphate
  modified_base 8: mod_base = OTHER; note = cytidine-3'-phosphate
  modified_base 9: mod_base = OTHER; note = guanosine-3'-phosphate
  modified_base 10: mod_base = OTHER; note = adenosine-3'-phosphate
  modified_base 11: mod_base = OTHER; note = guanosine-3'-phosphate
  modified_base 12: mod_base = OTHER; note = cytidine-3'-phosphate
  modified_base 13: mod_base = OTHER; note = uridine-3'-phosphate
  modified_base 14: mod_base = OTHER; note = uridine-3'-phosphate
  modified_base 15: mod_base = OTHER; note = cytidine-3'-phosphate
  modified_base 16: mod_base = OTHER; note = cytidine-3'-phosphate
  modified_base 17: mod_base = OTHER; note = uridine-3'-phosphate
  modified_base 18: mod_base = OTHER; note = guanosine-3'-phosphate
  modified_base 19: mod_base = OTHER; note = guanosine-3'-phosphate
  misc_feature 1..19: note = RNA
  misc_feature 20..21: note = DNA
cactcaccgagcttcctggtt

SEQ ID NO: 1135 - DNA, 21 bp, synthetic construct
  source 1..21: mol_type = other DNA
  modified_base 1: mod_base = OTHER; note = guanosine-3'-phosphate
  modified_base 2: mod_base = OTHER; note = guanosine-3'-phosphate
  modified_base 3: mod_base = OTHER; note = adenosine-3'-phosphate
  modified_base 4: mod_base = OTHER; note = adenosine-3'-phosphate
  modified_base 5: mod_base = OTHER; note = guanosine-3'-phosphate
  modified_base 6: mod_base = OTHER; note = cytidine-3'-phosphate
  modified_base 7: mod_base = OTHER; note = uridine-3'-phosphate
  modified_base 8: mod_base = OTHER; note = cytidine-3'-phosphate
  modified_base 9: mod_base = OTHER; note = guanosine-3'-phosphate
  modified_base 10: mod_base = OTHER; note = guanosine-3'-phosphate
  modified_base 11: mod_base = OTHER; note = uridine-3'-phosphate
  modified_base 12: mod_base = OTHER; note = guanosine-3'-phosphate
  modified_base 13: mod_base = OTHER; note = adenosine-3'-phosphate
  modified_base 14: mod_base = OTHER; note = guanosine-3'-phosphate
  modified_base 15: mod_base = OTHER; note = uridine-3'-phosphate
  modified_base 16: mod_base = OTHER; note = guanosine-3'-phosphate
  modified_base 17: mod_base = OTHER; note = adenosine-3'-phosphate
  modified_base 18: mod_base = OTHER; note = uridine-3'-phosphate
  modified_base 19: mod_base = OTHER; note = guanosine-3'-phosphate
  misc_feature 1..19: note = RNA
  misc_feature 20..21: note = DNA
ggaagctcggtgagtgatgtt

SEQ ID NO: 1136 - DNA, 21 bp, synthetic construct
  source 1..21: mol_type = other DNA
  modified_base 1: mod_base = OTHER; note = cytidine-3'-phosphate
  modified_base 2: mod_base = OTHER; note = adenosine-3'-phosphate
  modified_base 3: mod_base = OTHER; note = uridine-3'-phosphate
  modified_base 4: mod_base = OTHER; note = cytidine-3'-phosphate
  modified_base 5: mod_base = OTHER; note = adenosine-3'-phosphate
  modified_base 6: mod_base = OTHER; note = cytidine-3'-phosphate
  modified_base 7: mod_base = OTHER; note = uridine-3'-phosphate
  modified_base 8: mod_base = OTHER; note = cytidine-3'-phosphate
  modified_base 9: mod_base = OTHER; note = adenosine-3'-phosphate
  modified_base 10: mod_base = OTHER; note = cytidine-3'-phosphate
  modified_base 11: mod_base = OTHER; note = cytidine-3'-phosphate
  modified_base 12: mod_base = OTHER; note = guanosine-3'-phosphate
  modified_base 13: mod_base = OTHER; note = adenosine-3'-phosphate
  modified_base 14: mod_base = OTHER; note = guanosine-3'-phosphate
  modified_base 15: mod_base = OTHER; note = cytidine-3'-phosphate
  modified_base 16: mod_base = OTHER; note = uridine-3'-phosphate
  modified_base 17: mod_base = OTHER; note = uridine-3'-phosphate
  modified_base 18: mod_base = OTHER; note = cytidine-3'-phosphate
  modified_base 19: mod_base = OTHER; note = cytidine-3'-phosphate
  misc_feature 1..19: note = RNA
  misc_feature 20..21: note = DNA
catcactcaccgagcttcctt

SEQ ID NO: 1137 - DNA, 21 bp, synthetic construct
  source 1..21: mol_type = other DNA
  modified_base 1: mod_base = OTHER; note = guanosine-3'-phosphate
  modified_base 2: mod_base = OTHER; note = uridine-3'-phosphate
  modified_base 3: mod_base = OTHER; note = guanosine-3'-phosphate
  modified_base 4: mod_base = OTHER; note = adenosine-3'-phosphate
  modified_base 5: mod_base = OTHER; note = guanosine-3'-phosphate
  modified_base 6: mod_base = OTHER; note = uridine-3'-phosphate
  modified_base 7: mod_base = OTHER; note = guanosine-3'-phosphate
  modified_base 8: mod_base = OTHER; note = adenosine-3'-phosphate
  modified_base 9: mod_base = OTHER; note = uridine-3'-phosphate
  modified_base 10: mod_base = OTHER; note = guanosine-3'-phosphate
  modified_base 11: mod_base = OTHER; note = guanosine-3'-phosphate
  modified_base 12: mod_base = OTHER; note = cytidine-3'-phosphate
  modified_base 13: mod_base = OTHER; note = adenosine-3'-phosphate
  modified_base 14: mod_base = OTHER; note = guanosine-3'-phosphate
  modified_base 15: mod_base = OTHER; note = adenosine-3'-phosphate
  modified_base 16: mod_base = OTHER; note = adenosine-3'-phosphate
  modified_base 17: mod_base = OTHER; note = cytidine-3'-phosphate
  modified_base 18: mod_base = OTHER; note = guanosine-3'-phosphate
  modified_base 19: mod_base = OTHER; note = adenosine-3'-phosphate
  misc_feature 1..19: note = RNA
  misc_feature 20..21: note = DNA
gtgagtgatggcagaacgatt

SEQ ID NO: 1138 - DNA, 21 bp, synthetic construct
  source 1..21: mol_type = other DNA
  modified_base 1: mod_base = OTHER; note = uridine-3'-phosphate
  modified_base 2: mod_base = OTHER; note = cytidine-3'-phosphate
  modified_base 3: mod_base = OTHER; note = guanosine-3'-phosphate
  modified_base 4: mod_base = OTHER; note = uridine-3'-phosphate
  modified_base 5: mod_base = OTHER; note = uridine-3'-phosphate
  modified_base 6: mod_base = OTHER; note = cytidine-3'-phosphate
  modified_base 7: mod_base = OTHER; note = uridine-3'-phosphate
  modified_base 8: mod_base = OTHER; note = guanosine-3'-phosphate
  modified_base 9: mod_base = OTHER; note = cytidine-3'-phosphate
  modified_base 10: mod_base = OTHER; note = cytidine-3'-phosphate
  modified_base 11: mod_base = OTHER; note = adenosine-3'-phosphate
  modified_base 12: mod_base = OTHER; note = uridine-3'-phosphate
  modified_base 13: mod_base = OTHER; note = cytidine-3'-phosphate
  modified_base 14: mod_base = OTHER; note = adenosine-3'-phosphate
  modified_base 15: mod_base = OTHER; note = cytidine-3'-phosphate
  modified_base 16: mod_base = OTHER; note = uridine-3'-phosphate
  modified_base 17: mod_base = OTHER; note = cytidine-3'-phosphate
  modified_base 18: mod_base = OTHER; note = adenosine-3'-phosphate
  modified_base 19: mod_base = OTHER; note = cytidine-3'-phosphate
  misc_feature 1..19: note = RNA
  misc_feature 20..21: note = DNA
tcgttctgccatcactcactt

SEQ ID NO: 1139 - DNA, 21 bp, synthetic construct
  source 1..21: mol_type = other DNA
  modified_base 1: mod_base = OTHER; note = guanosine-3'-phosphate
  modified_base 2: mod_base = OTHER; note = adenosine-3'-phosphate
  modified_base 3: mod_base = OTHER; note = guanosine-3'-phosphate
  modified_base 4: mod_base = OTHER; note = uridine-3'-phosphate
  modified_base 5: mod_base = OTHER; note = guanosine-3'-phosphate
  modified_base 6: mod_base = OTHER; note = adenosine-3'-phosphate
  modified_base 7: mod_base = OTHER; note = uridine-3'-phosphate
  modified_base 8: mod_base = OTHER; note = guanosine-3'-phosphate
  modified_base 9: mod_base = OTHER; note = guanosine-3'-phosphate
  modified_base 10: mod_base = OTHER; note = cytidine-3'-phosphate
  modified_base 11: mod_base = OTHER; note = adenosine-3'-phosphate
  modified_base 12: mod_base = OTHER; note = guanosine-3'-phosphate
  modified_base 13: mod_base = OTHER; note = adenosine-3'-phosphate
  modified_base 14: mod_base = OTHER; note = adenosine-3'-phosphate
  modified_base 15: mod_base = OTHER; note = cytidine-3'-phosphate
  modified_base 16: mod_base = OTHER; note = guanosine-3'-phosphate
  modified_base 17: mod_base = OTHER; note = adenosine-3'-phosphate
  modified_base 18: mod_base = OTHER; note = uridine-3'-phosphate
  modified_base 19: mod_base = OTHER; note = guanosine-3'-phosphate
  misc_feature 1..19: note = RNA
  misc_feature 20..21: note = DNA
gagtgatggcagaacgatgtt

SEQ ID NO: 1140 - DNA, 21 bp, synthetic construct
  source 1..21: mol_type = other DNA
  modified_base 1: mod_base = OTHER; note = cytidine-3'-phosphate
  modified_base 2: mod_base = OTHER; note = adenosine-3'-phosphate
  modified_base 3: mod_base = OTHER; note = uridine-3'-phosphate
  modified_base 4: mod_base = OTHER; note = cytidine-3'-phosphate
  modified_base 5: mod_base = OTHER; note = guanosine-3'-phosphate
  modified_base 6: mod_base = OTHER; note = uridine-3'-phosphate
  modified_base 7: mod_base = OTHER; note = uridine-3'-phosphate
  modified_base 8: mod_base = OTHER; note = cytidine-3'-phosphate
  modified_base 9: mod_base = OTHER; note = uridine-3'-phosphate
  modified_base 10: mod_base = OTHER; note = guanosine-3'-phosphate
  modified_base 11: mod_base = OTHER; note = cytidine-3'-phosphate
  modified_base 12: mod_base = OTHER; note = cytidine-3'-phosphate
  modified_base 13: mod_base = OTHER; note = adenosine-3'-phosphate
  modified_base 14: mod_base = OTHER; note = uridine-3'-phosphate
  modified_base 15: mod_base = OTHER; note = cytidine-3'-phosphate
  modified_base 16: mod_base = OTHER; note = adenosine-3'-phosphate
  modified_base 17: mod_base = OTHER; note = cytidine-3'-phosphate
  modified_base 18: mod_base = OTHER; note = uridine-3'-phosphate
  modified_base 19: mod_base = OTHER; note = cytidine-3'-phosphate
  misc_feature 1..19: note = RNA
  misc_feature 20..21: note = DNA
catcgttctgccatcactctt

SEQ ID NO: 1141 - DNA, 21 bp, synthetic construct
  source 1..21: mol_type = other DNA
  modified_base 1: mod_base = OTHER; note = guanosine-3'-phosphate
  modified_base 2: mod_base = OTHER; note = adenosine-3'-phosphate
  modified_base 3: mod_base = OTHER; note = uridine-3'-phosphate
  modified_base 4: mod_base = OTHER; note = guanosine-3'-phosphate
  modified_base 5: mod_base = OTHER; note = guanosine-3'-phosphate
  modified_base 6: mod_base = OTHER; note = cytidine-3'-phosphate
  modified_base 7: mod_base = OTHER; note = adenosine-3'-phosphate
  modified_base 8: mod_base = OTHER; note = guanosine-3'-phosphate
  modified_base 9: mod_base = OTHER; note = adenosine-3'-phosphate
  modified_base 10: mod_base = OTHER; note = adenosine-3'-phosphate
  modified_base 11: mod_base = OTHER; note = cytidine-3'-phosphate
  modified_base 12: mod_base = OTHER; note = guanosine-3'-phosphate
  modified_base 13: mod_base = OTHER; note = adenosine-3'-phosphate
  modified_base 14: mod_base = OTHER; note = uridine-3'-phosphate
  modified_base 15: mod_base = OTHER; note = guanosine-3'-phosphate
  modified_base 16: mod_base = OTHER; note = cytidine-3'-phosphate
  modified_base 17: mod_base = OTHER; note = cytidine-3'-phosphate
  modified_base 18: mod_base = OTHER; note = uridine-3'-phosphate
  modified_base 19: mod_base = OTHER; note = guanosine-3'-phosphate
  misc_feature 1..19: note = RNA
  misc_feature 20..21: note = DNA
gatggcagaacgatgcctgtt

SEQ ID NO: 1142 - DNA, 21 bp, synthetic construct
  source 1..21: mol_type = other DNA
  modified_base 1: mod_base = OTHER; note = cytidine-3'-phosphate
  modified_base 2: mod_base = OTHER; note = adenosine-3'-phosphate
  modified_base 3: mod_base = OTHER; note = guanosine-3'-phosphate
  modified_base 4: mod_base = OTHER; note = guanosine-3'-phosphate
  modified_base 5: mod_base = OTHER; note = cytidine-3'-phosphate
  modified_base 6: mod_base = OTHER; note = adenosine-3'-phosphate
  modified_base 7: mod_base = OTHER; note = uridine-3'-phosphate
  modified_base 8: mod_base = OTHER; note = cytidine-3'-phosphate
  modified_base 9: mod_base = OTHER; note = guanosine-3'-phosphate
  modified_base 10: mod_base = OTHER; note = uridine-3'-phosphate
  modified_base 11: mod_base = OTHER; note = uridine-3'-phosphate
  modified_base 12: mod_base = OTHER; note = cytidine-3'-phosphate
  modified_base 13: mod_base = OTHER; note = uridine-3'-phosphate
  modified_base 14: mod_base = OTHER; note = guanosine-3'-phosphate
  modified_base 15: mod_base = OTHER; note = cytidine-3'-phosphate
  modified_base 16: mod_base = OTHER; note = cytidine-3'-phosphate
  modified_base 17: mod_base = OTHER; note = adenosine-3'-phosphate
  modified_base 18: mod_base = OTHER; note = uridine-3'-phosphate
  modified_base 19: mod_base = OTHER; note = cytidine-3'-phosphate
  misc_feature 1..19: note = RNA
  misc_feature 20..21: note = DNA
caggcatcgttctgccatctt

SEQ ID NO: 1143 - DNA, 21 bp, synthetic construct
  source 1..21: mol_type = other DNA
  modified_base 1: mod_base = OTHER; note = adenosine-3'-phosphate
  modified_base 2: mod_base = OTHER; note = guanosine-3'-phosphate
  modified_base 3: mod_base = OTHER; note = adenosine-3'-phosphate
  modified_base 4: mod_base = OTHER; note = adenosine-3'-phosphate
  modified_base 5: mod_base = OTHER; note = cytidine-3'-phosphate
  modified_base 6: mod_base = OTHER; note = guanosine-3'-phosphate
  modified_base 7: mod_base = OTHER; note = adenosine-3'-phosphate
  modified_base 8: mod_base = OTHER; note = uridine-3'-phosphate
  modified_base 9: mod_base = OTHER; note = guanosine-3'-phosphate
  modified_base 10: mod_base = OTHER; note = cytidine-3'-phosphate
  modified_base 11: mod_base = OTHER; note = cytidine-3'-phosphate
  modified_base 12: mod_base = OTHER; note = uridine-3'-phosphate
  modified_base 13: mod_base = OTHER; note = guanosine-3'-phosphate
  modified_base 14: mod_base = OTHER; note = cytidine-3'-phosphate
  modified_base 15: mod_base = OTHER; note = adenosine-3'-phosphate
  modified_base 16: mod_base = OTHER; note = guanosine-3'-phosphate
  modified_base 17: mod_base = OTHER; note = guanosine-3'-phosphate
  modified_base 18: mod_base = OTHER; note = cytidine-3'-phosphate
  modified_base 19: mod_base = OTHER; note = adenosine-3'-phosphate
  misc_feature 1..19: note = RNA
  misc_feature 20..21: note = DNA
agaacgatgcctgcaggcatt

SEQ ID NO: 1144 - DNA, 21 bp, synthetic construct
  source 1..21: mol_type = other DNA
  modified_base 1: mod_base = OTHER; note = uridine-3'-phosphate
  modified_base 2: mod_base = OTHER; note = guanosine-3'-phosphate
  modified_base 3: mod_base = OTHER; note = cytidine-3'-phosphate
  modified_base 4: mod_base = OTHER; note = cytidine-3'-phosphate
  modified_base 5: mod_base = OTHER; note = uridine-3'-phosphate
  modified_base 6: mod_base = OTHER; note = guanosine-3'-phosphate
  modified_base 7: mod_base = OTHER; note = cytidine-3'-phosphate
  modified_base 8: mod_base = OTHER; note = adenosine-3'-phosphate
  modified_base 9: mod_base = OTHER; note = guanosine-3'-phosphate
  modified_base 10: mod_base = OTHER; note = guanosine-3'-phosphate
  modified_base 11: mod_base = OTHER; note = cytidine-3'-phosphate
  modified_base 12: mod_base = OTHER; note = adenosine-3'-phosphate
  modified_base 13: mod_base = OTHER; note = uridine-3'-phosphate
  modified_base 14: mod_base = OTHER; note = cytidine-3'-phosphate
  modified_base 15: mod_base = OTHER; note = guanosine-3'-phosphate
  modified_base 16: mod_base = OTHER; note = uridine-3'-phosphate
  modified_base 17: mod_base = OTHER; note = uridine-3'-phosphate
  modified_base 18: mod_base = OTHER; note = cytidine-3'-phosphate
  modified_base 19: mod_base = OTHER; note = uridine-3'-phosphate
  misc_feature 1..19: note = RNA
  misc_feature 20..21: note = DNA
tgcctgcaggcatcgttcttt

SEQ ID NO: 1145 - DNA, 21 bp, synthetic construct
  source 1..21: mol_type = other DNA
  modified_base 1: mod_base = OTHER; note = adenosine-3'-phosphate
  modified_base 2: mod_base = OTHER; note = cytidine-3'-phosphate
  modified_base 3: mod_base = OTHER; note = guanosine-3'-phosphate
  modified_base 4: mod_base = OTHER; note = adenosine-3'-phosphate
  modified_base 5: mod_base = OTHER; note = uridine-3'-phosphate
  modified_base 6: mod_base = OTHER; note = guanosine-3'-phosphate
  modified_base 7: mod_base = OTHER; note = cytidine-3'-phosphate
  modified_base 8: mod_base = OTHER; note = cytidine-3'-phosphate
  modified_base 9: mod_base = OTHER; note = uridine-3'-phosphate
  modified_base 10: mod_base = OTHER; note = guanosine-3'-phosphate
  modified_base 11: mod_base = OTHER; note = cytidine-3'-phosphate
  modified_base 12: mod_base = OTHER; note = adenosine-3'-phosphate
  modified_base 13: mod_base = OTHER; note = guanosine-3'-phosphate
  modified_base 14: mod_base = OTHER; note = guanosine-3'-phosphate
  modified_base 15: mod_base = OTHER; note = cytidine-3'-phosphate
  modified_base 16: mod_base = OTHER; note = adenosine-3'-phosphate
  modified_base 17: mod_base = OTHER; note = uridine-3'-phosphate
  modified_base 18: mod_base = OTHER; note = guanosine-3'-phosphate
  modified_base 19: mod_base = OTHER; note = guanosine-3'-phosphate
  misc_feature 1..19: note = RNA
  misc_feature 20..21: note = DNA
acgatgcctgcaggcatggtt

SEQ ID NO: 1146 - DNA, 21 bp, synthetic construct
  source 1..21: mol_type = other DNA
  modified_base 1: mod_base = OTHER; note = cytidine-3'-phosphate
  modified_base 2: mod_base = OTHER; note = cytidine-3'-phosphate
  modified_base 3: mod_base = OTHER; note = adenosine-3'-phosphate
  modified_base 4: mod_base = OTHER; note = uridine-3'-phosphate
  modified_base 5: mod_base = OTHER; note = guanosine-3'-phosphate
  modified_base 6: mod_base = OTHER; note = cytidine-3'-phosphate
  modified_base 7: mod_base = OTHER; note = cytidine-3'-phosphate
  modified_base 8: mod_base = OTHER; note = uridine-3'-phosphate
  modified_base 9: mod_base = OTHER; note = guanosine-3'-phosphate
  modified_base 10: mod_base = OTHER; note = cytidine-3'-phosphate
  modified_base 11: mod_base = OTHER; note = adenosine-3'-phosphate
  modified_base 12: mod_base = OTHER; note = guanosine-3'-phosphate
  modified_base 13: mod_base = OTHER; note = guanosine-3'-phosphate
  modified_base 14: mod_base = OTHER; note = cytidine-3'-phosphate
  modified_base 15: mod_base = OTHER; note = adenosine-3'-phosphate
  modified_base 16: mod_base = OTHER; note = uridine-3'-phosphate
  modified_base 17: mod_base = OTHER; note = cytidine-3'-phosphate
  modified_base 18: mod_base = OTHER; note = guanosine-3'-phosphate
  modified_base 19: mod_base = OTHER; note = uridine-3'-phosphate
  misc_feature 1..19: note = RNA
  misc_feature 20..21: note = DNA
ccatgcctgcaggcatcgttt

SEQ ID NO: 1147 - DNA, 21 bp, synthetic construct
  source 1..21: mol_type = other DNA
  modified_base 1: mod_base = OTHER; note = guanosine-3'-phosphate
  modified_base 2: mod_base = OTHER; note = cytidine-3'-phosphate
  modified_base 3: mod_base = OTHER; note = adenosine-3'-phosphate
  modified_base 4: mod_base = OTHER; note = guanosine-3'-phosphate
  modified_base 5: mod_base = OTHER; note = guanosine-3'-phosphate
  modified_base 6: mod_base = OTHER; note = cytidine-3'-phosphate
  modified_base 7: mod_base = OTHER; note = adenosine-3'-phosphate
  modified_base 8: mod_base = OTHER; note = uridine-3'-phosphate
  modified_base 9: mod_base = OTHER; note = guanosine-3'-phosphate
  modified_base 10: mod_base = OTHER; note = guanosine-3'-phosphate
  modified_base 11: mod_base = OTHER; note = adenosine-3'-phosphate
  modified_base 12: mod_base = OTHER; note = adenosine-3'-phosphate
  modified_base 13: mod_base = OTHER; note = cytidine-3'-phosphate
  modified_base 14: mod_base = OTHER; note = uridine-3'-phosphate
  modified_base 15: mod_base = OTHER; note = uridine-3'-phosphate
  modified_base 16: mod_base = OTHER; note = uridine-3'-phosphate
  modified_base 17: mod_base = OTHER; note = uridine-3'-phosphate
  modified_base 18: mod_base = OTHER; note = uridine-3'-phosphate
  modified_base 19: mod_base = OTHER; note = cytidine-3'-phosphate
  misc_feature 1..19: note = RNA
  misc_feature 20..21: note = DNA
gcaggcatggaactttttctt

SEQ ID NO: 1148 - DNA, 21 bp, synthetic construct
  source 1..21: mol_type = other DNA
  modified_base 1: mod_base = OTHER; note = guanosine-3'-phosphate
  modified_base 2: mod_base = OTHER; note = adenosine-3'-phosphate
  modified_base 3: mod_base = OTHER; note = adenosine-3'-phosphate
  modified_base 4: mod_base = OTHER; note = adenosine-3'-phosphate
  modified_base 5: mod_base = OTHER; note = adenosine-3'-phosphate
  modified_base 6: mod_base = OTHER; note = adenosine-3'-phosphate
  modified_base 7: mod_base = OTHER; note = guanosine-3'-phosphate
  modified_base 8: mod_base = OTHER; note = uridine-3'-phosphate
  modified_base 9: mod_base = OTHER; note = uridine-3'-phosphate
  modified_base 10: mod_base = OTHER; note = cytidine-3'-phosphate
  modified_base 11: mod_base = OTHER; note = cytidine-3'-phosphate
  modified_base 12: mod_base = OTHER; note = adenosine-3'-phosphate
  modified_base 13: mod_base = OTHER; note = uridine-3'-phosphate
  modified_base 14: mod_base = OTHER; note = guanosine-3'-phosphate
  modified_base 15: mod_base = OTHER; note = cytidine-3'-phosphate
  modified_base 16: mod_base = OTHER; note = cytidine-3'-phosphate
  modified_base 17: mod_base = OTHER; note = uridine-3'-phosphate
  modified_base 18: mod_base = OTHER; note = guanosine-3'-phosphate
  modified_base 19: mod_base = OTHER; note = cytidine-3'-phosphate
  misc_feature 1..19: note = RNA
  misc_feature 20..21: note = DNA
gaaaaagttccatgcctgctt

SEQ ID NO: 1149 - DNA, 21 bp, synthetic construct
  source 1..21: mol_type = other DNA
  modified_base 1: mod_base = OTHER; note = guanosine-3'-phosphate
  modified_base 2: mod_base = OTHER; note = guanosine-3'-phosphate
  modified_base 3: mod_base = OTHER; note = adenosine-3'-phosphate
  modified_base 4: mod_base = OTHER; note = adenosine-3'-phosphate
  modified_base 5: mod_base = OTHER; note = cytidine-3'-phosphate
  modified_base 6: mod_base = OTHER; note = uridine-3'-phosphate
  modified_base 7: mod_base = OTHER; note = uridine-3'-phosphate
  modified_base 8: mod_base = OTHER; note = uridine-3'-phosphate
  modified_base 9: mod_base = OTHER; note = uridine-3'-phosphate
  modified_base 10: mod_base = OTHER; note = uridine-3'-phosphate
  modified_base 11: mod_base = OTHER; note = cytidine-3'-phosphate
  modified_base 12: mod_base = OTHER; note = cytidine-3'-phosphate
  modified_base 13: mod_base = OTHER; note = guanosine-3'-phosphate
  modified_base 14: mod_base = OTHER; note = uridine-3'-phosphate
  modified_base 15: mod_base = OTHER; note = uridine-3'-phosphate
  modified_base 16: mod_base = OTHER; note = adenosine-3'-phosphate
  modified_base 17: mod_base = OTHER; note = uridine-3'-phosphate
  modified_base 18: mod_base = OTHER; note = cytidine-3'-phosphate
  modified_base 19: mod_base = OTHER; note = adenosine-3'-phosphate
  misc_feature 1..19: note = RNA
  misc_feature 20..21: note = DNA
ggaactttttccgttatcatt

SEQ ID NO: 1150 - DNA, 21 bp, synthetic construct
  source 1..21: mol_type = other DNA
  modified_base 1: mod_base = OTHER; note = uridine-3'-phosphate
  modified_base 2: mod_base = OTHER; note = guanosine-3'-phosphate
  modified_base 3: mod_base = OTHER; note = adenosine-3'-phosphate
  modified_base 4: mod_base = OTHER; note = uridine-3'-phosphate
  modified_base 5: mod_base = OTHER; note = adenosine-3'-phosphate
  modified_base 6: mod_base = OTHER; note = adenosine-3'-phosphate
  modified_base 7: mod_base = OTHER; note = cytidine-3'-phosphate
  modified_base 8: mod_base = OTHER; note = guanosine-3'-phosphate
  modified_base 9: mod_base = OTHER; note = guanosine-3'-phosphate
  modified_base 10: mod_base = OTHER; note = adenosine-3'-phosphate
  modified_base 11: mod_base = OTHER; note = adenosine-3'-phosphate
  modified_base 12: mod_base = OTHER; note = adenosine-3'-phosphate
  modified_base 13: mod_base = OTHER; note = adenosine-3'-phosphate
  modified_base 14: mod_base = OTHER; note = adenosine-3'-phosphate
  modified_base 15: mod_base = OTHER; note = guanosine-3'-phosphate
  modified_base 16: mod_base = OTHER; note = uridine-3'-phosphate
  modified_base 17: mod_base = OTHER; note = uridine-3'-phosphate
  modified_base 18: mod_base = OTHER; note = cytidine-3'-phosphate
  modified_base 19: mod_base = OTHER; note = cytidine-3'-phosphate
  misc_feature 1..19: note = RNA
  misc_feature 20..21: note = DNA
tgataacggaaaaagttcctt

SEQ ID NO: 1151 - DNA, 21 bp, synthetic construct
  source 1..21: mol_type = other DNA
  modified_base 1: mod_base = OTHER; note = guanosine-3'-phosphate
  modified_base 2: mod_base = OTHER; note = adenosine-3'-phosphate
  modified_base 3: mod_base = OTHER; note = adenosine-3'-phosphate
  modified_base 4: mod_base = OTHER; note = cytidine-3'-phosphate
  modified_base 5: mod_base = OTHER; note = uridine-3'-phosphate
  modified_base 6: mod_base = OTHER; note = uridine-3'-phosphate
  modified_base 7: mod_base = OTHER; note = uridine-3'-phosphate
  modified_base 8: mod_base = OTHER; note = uridine-3'-phosphate
  modified_base 9: mod_base = OTHER; note = uridine-3'-phosphate
  modified_base 10: mod_base = OTHER; note = cytidine-3'-phosphate
  modified_base 11: mod_base = OTHER; note = cytidine-3'-phosphate
  modified_base 12: mod_base = OTHER; note = guanosine-3'-phosphate
  modified_base 13: mod_base = OTHER; note = uridine-3'-phosphate
  modified_base 14: mod_base = OTHER; note = uridine-3'-phosphate
  modified_base 15: mod_base = OTHER; note = adenosine-3'-phosphate
  modified_base 16: mod_base = OTHER; note = uridine-3'-phosphate
  modified_base 17: mod_base = OTHER; note = cytidine-3'-phosphate
  modified_base 18: mod_base = OTHER; note = adenosine-3'-phosphate
  modified_base 19: mod_base = OTHER; note = cytidine-3'-phosphate
  misc_feature 1..19: note = RNA
  misc_feature 20..21: note = DNA
gaactttttccgttatcactt

SEQ ID NO: 1152 - DNA, 21 bp, synthetic construct
  source 1..21: mol_type = other DNA
  modified_base 1: mod_base = OTHER; note = guanosine-3'-phosphate
  modified_base 2: mod_base = OTHER; note = uridine-3'-phosphate
  modified_base 3: mod_base = OTHER; note = guanosine-3'-phosphate
  modified_base 4: mod_base = OTHER; note = adenosine-3'-phosphate
  modified_base 5: mod_base = OTHER; note = uridine-3'-phosphate
  modified_base 6: mod_base = OTHER; note = adenosine-3'-phosphate
  modified_base 7: mod_base = OTHER; note = adenosine-3'-phosphate
  modified_base 8: mod_base = OTHER; note = cytidine-3'-phosphate
  modified_base 9: mod_base = OTHER; note = guanosine-3'-phosphate
  modified_base 10: mod_base = OTHER; note = guanosine-3'-phosphate
  modified_base 11: mod_base = OTHER; note = adenosine-3'-phosphate
  modified_base 12: mod_base = OTHER; note = adenosine-3'-phosphate
  modified_base 13: mod_base = OTHER; note = adenosine-3'-phosphate
  modified_base 14: mod_base = OTHER; note = adenosine-3'-phosphate
  modified_base 15: mod_base = OTHER; note = adenosine-3'-phosphate
  modified_base 16: mod_base = OTHER; note = guanosine-3'-phosphate
  modified_base 17: mod_base = OTHER; note = uridine-3'-phosphate
  modified_base 18: mod_base = OTHER; note = uridine-3'-phosphate
  modified_base 19: mod_base = OTHER; note = cytidine-3'-phosphate
  misc_feature 1..19: note = RNA
  misc_feature 20..21: note = DNA
gtgataacggaaaaagttctt

SEQ ID NO: 1153 - DNA, 21 bp, synthetic construct
  source 1..21: mol_type = other DNA
  modified_base 1: mod_base = OTHER; note = adenosine-3'-phosphate
  modified_base 2: mod_base = OTHER; note = adenosine-3'-phosphate
  modified_base 3: mod_base = OTHER; note = cytidine-3'-phosphate
  modified_base 4: mod_base = OTHER; note = uridine-3'-phosphate
  modified_base 5: mod_base = OTHER; note = uridine-3'-phosphate
  modified_base 6: mod_base = OTHER; note = uridine-3'-phosphate
  modified_base 7: mod_base = OTHER; note = uridine-3'-phosphate
  modified_base 8: mod_base = OTHER; note = uridine-3'-phosphate
  modified_base 9: mod_base = OTHER; note = cytidine-3'-phosphate
  modified_base 10: mod_base = OTHER; note = cytidine-3'-phosphate
  modified_base 11: mod_base = OTHER; note = guanosine-3'-phosphate
  modified_base 12: mod_base = OTHER; note = uridine-3'-phosphate
  modified_base 13: mod_base = OTHER; note = uridine-3'-phosphate
  modified_base 14: mod_base = OTHER; note = adenosine-3'-phosphate
  modified_base 15: mod_base = OTHER; note = uridine-3'-phosphate
  modified_base 16: mod_base = OTHER; note = cytidine-3'-phosphate
  modified_base 17: mod_base = OTHER; note = adenosine-3'-phosphate
  modified_base 18: mod_base = OTHER; note = cytidine-3'-phosphate
  modified_base 19: mod_base = OTHER; note = cytidine-3'-phosphate
  misc_feature 1..19: note = RNA
  misc_feature 20..21: note = DNA
aactttttccgttatcacctt

SEQ ID NO: 1154 - DNA, 21 bp, synthetic construct
  source 1..21: mol_type = other DNA
  modified_base 1: mod_base = OTHER; note = guanosine-3'-phosphate
  modified_base 2: mod_base = OTHER; note = guanosine-3'-phosphate
  modified_base 3: mod_base = OTHER; note = uridine-3'-phosphate
  modified_base 4: mod_base = OTHER; note = guanosine-3'-phosphate
  modified_base 5: mod_base = OTHER; note = adenosine-3'-phosphate
  modified_base 6: mod_base = OTHER; note = uridine-3'-phosphate
  modified_base 7: mod_base = OTHER; note = adenosine-3'-phosphate
  modified_base 8: mod_base = OTHER; note = adenosine-3'-phosphate
  modified_base 9: mod_base = OTHER; note = cytidine-3'-phosphate
  modified_base 10: mod_base = OTHER; note = guanosine-3'-phosphate
  modified_base 11: mod_base = OTHER; note = guanosine-3'-phosphate
  modified_base 12: mod_base = OTHER; note = adenosine-3'-phosphate
  modified_base 13: mod_base = OTHER; note = adenosine-3'-phosphate
  modified_base 14: mod_base = OTHER; note = adenosine-3'-phosphate
  modified_base 15: mod_base = OTHER; note = adenosine-3'-phosphate
  modified_base 16: mod_base = OTHER; note = adenosine-3'-phosphate
  modified_base 17: mod_base = OTHER; note = guanosine-3'-phosphate
  modified_base 18: mod_base = OTHER; note = uridine-3'-phosphate
  modified_base 19: mod_base = OTHER; note = uridine-3'-phosphate
  misc_feature 1..19: note = RNA
  misc_feature 20..21: note = DNA
ggtgataacggaaaaagtttt

SEQ ID NO: 1155 - DNA, 21 bp, synthetic construct
  source 1..21: mol_type = other DNA
  modified_base 1: mod_base = OTHER; note = uridine-3'-phosphate
  modified_base 2: mod_base = OTHER; note = adenosine-3'-phosphate
  modified_base 3: mod_base = OTHER; note = uridine-3'-phosphate
  modified_base 4: mod_base = OTHER; note = cytidine-3'-phosphate
  modified_base 5: mod_base = OTHER; note = adenosine-3'-phosphate
  modified_base 6: mod_base = OTHER; note = cytidine-3'-phosphate
  modified_base 7: mod_base = OTHER; note = cytidine-3'-phosphate
  modified_base 8: mod_base = OTHER; note = cytidine-3'-phosphate
  modified_base 9: mod_base = OTHER; note = adenosine-3'-phosphate
  modified_base 10: mod_base = OTHER; note = guanosine-3'-phosphate
  modified_base 11: mod_base = OTHER; note = guanosine-3'-phosphate
  modified_base 12: mod_base = OTHER; note = cytidine-3'-phosphate
  modified_base 13: mod_base = OTHER; note = cytidine-3'-phosphate
  modified_base 14: mod_base = OTHER; note = uridine-3'-phosphate
  modified_base 15: mod_base = OTHER; note = guanosine-3'-phosphate
  modified_base 16: mod_base = OTHER; note = adenosine-3'-phosphate
  modified_base 17: mod_base = OTHER; note = uridine-3'-phosphate
  modified_base 18: mod_base = OTHER; note = uridine-3'-phosphate
  modified_base 19: mod_base = OTHER; note = cytidine-3'-phosphate
  misc_feature 1..19: note = RNA
  misc_feature 20..21: note = DNA
tatcacccaggcctgattctt

SEQ ID NO: 1156 - DNA, 21 bp, synthetic construct
  source 1..21: mol_type = other DNA
  modified_base 1: mod_base = OTHER; note = guanosine-3'-phosphate
  modified_base 2: mod_base = OTHER; note = adenosine-3'-phosphate
  modified_base 3: mod_base = OTHER; note = adenosine-3'-phosphate
  modified_base 4: mod_base = OTHER; note = uridine-3'-phosphate
  modified_base 5: mod_base = OTHER; note = cytidine-3'-phosphate
  modified_base 6: mod_base = OTHER; note = adenosine-3'-phosphate
  modified_base 7: mod_base = OTHER; note = guanosine-3'-phosphate
  modified_base 8: mod_base = OTHER; note = guanosine-3'-phosphate
  modified_base 9: mod_base = OTHER; note = cytidine-3'-phosphate
  modified_base 10: mod_base = OTHER; note = cytidine-3'-phosphate
  modified_base 11: mod_base = OTHER; note = uridine-3'-phosphate
  modified_base 12: mod_base = OTHER; note = guanosine-3'-phosphate
  modified_base 13: mod_base = OTHER; note = guanosine-3'-phosphate
  modified_base 14: mod_base = OTHER; note = guanosine-3'-phosphate
  modified_base 15: mod_base = OTHER; note = uridine-3'-phosphate
  modified_base 16: mod_base = OTHER; note = guanosine-3'-phosphate
  modified_base 17: mod_base = OTHER; note = adenosine-3'-phosphate
  modified_base 18: mod_base = OTHER; note = uridine-3'-phosphate
  modified_base 19: mod_base = OTHER; note = adenosine-3'-phosphate
  misc_feature 1..19: note = RNA
  misc_feature 20..21: note = DNA
gaatcaggcctgggtgatatt

SEQ ID NO: 1157 - DNA, 21 bp, synthetic construct
  source 1..21: mol_type = other DNA
  modified_base 1: mod_base = OTHER; note = adenosine-3'-phosphate
  modified_base 2: mod_base = OTHER; note = guanosine-3'-phosphate
  modified_base 3: mod_base = OTHER; note = guanosine-3'-phosphate
  modified_base 4: mod_base = OTHER; note = cytidine-3'-phosphate
  modified_base 5: mod_base = OTHER; note = cytidine-3'-phosphate
  modified_base 6: mod_base = OTHER; note = uridine-3'-phosphate
  modified_base 7: mod_base = OTHER; note = guanosine-3'-phosphate
  modified_base 8: mod_base = OTHER; note = adenosine-3'-phosphate
  modified_base 9: mod_base = OTHER; note = uridine-3'-phosphate
  modified_base 10: mod_base = OTHER; note = uridine-3'-phosphate
  modified_base 11: mod_base = OTHER; note = cytidine-3'-phosphate
  modified_base 12: mod_base = OTHER; note = adenosine-3'-phosphate
  modified_base 13: mod_base = OTHER; note = cytidine-3'-phosphate
  modified_base 14: mod_base = OTHER; note = uridine-3'-phosphate
  modified_base 15: mod_base = OTHER; note = guanosine-3'-phosphate
  modified_base 16: mod_base = OTHER; note = guanosine-3'-phosphate
  modified_base 17: mod_base = OTHER; note = cytidine-3'-phosphate
  modified_base 18: mod_base = OTHER; note = cytidine-3'-phosphate
  modified_base 19: mod_base = OTHER; note = uridine-3'-phosphate
  misc_feature 1..19: note = RNA
  misc_feature 20..21: note = DNA
aggcctgattcactggccttt

SEQ ID NO: 1158 - DNA, 21 bp, synthetic construct
  source 1..21: mol_type = other DNA
  modified_base 1: mod_base = OTHER; note = adenosine-3'-phosphate
  modified_base 2: mod_base = OTHER; note = guanosine-3'-phosphate
  modified_base 3: mod_base = OTHER; note = guanosine-3'-phosphate
  modified_base 4: mod_base = OTHER; note = cytidine-3'-phosphate
  modified_base 5: mod_base = OTHER; note = cytidine-3'-phosphate
  modified_base 6: mod_base = OTHER; note = adenosine-3'-phosphate
  modified_base 7: mod_base = OTHER; note = guanosine-3'-phosphate
  modified_base 8: mod_base = OTHER; note = uridine-3'-phosphate
  modified_base 9: mod_base = OTHER; note = guanosine-3'-phosphate
  modified_base 10: mod_base = OTHER; note = adenosine-3'-phosphate
  modified_base 11: mod_base = OTHER; note = adenosine-3'-phosphate
  modified_base 12: mod_base = OTHER; note = uridine-3'-phosphate
  modified_base 13: mod_base = OTHER; note = cytidine-3'-phosphate
  modified_base 14: mod_base = OTHER; note = adenosine-3'-phosphate
  modified_base 15: mod_base = OTHER; note = guanosine-3'-phosphate
  modified_base 16: mod_base = OTHER; note = guanosine-3'-phosphate
  modified_base 17: mod_base = OTHER; note = cytidine-3'-phosphate
  modified_base 18: mod_base = OTHER; note = cytidine-3'-phosphate
  modified_base 19: mod_base = OTHER; note = uridine-3'-phosphate
  misc_feature 1..19: note = RNA
  misc_feature 20..21: note = DNA
aggccagtgaatcaggccttt

SEQ ID NO: 1159 - DNA, 21 bp, synthetic construct
  source 1..21: mol_type = other DNA
  modified_base 1: mod_base = OTHER; note = uridine-3'-phosphate
  modified_base 2: mod_base = OTHER; note = guanosine-3'-phosphate
  modified_base 3: mod_base = OTHER; note = adenosine-3'-phosphate
  modified_base 4: mod_base = OTHER; note = uridine-3'-phosphate
  modified_base 5: mod_base = OTHER; note = uridine-3'-phosphate
  modified_base 6: mod_base = OTHER; note = cytidine-3'-phosphate
  modified_base 7: mod_base = OTHER; note = adenosine-3'-phosphate
  modified_base 8: mod_base = OTHER; note = cytidine-3'-phosphate
  modified_base 9: mod_base = OTHER; note = uridine-3'-phosphate
  modified_base 10: mod_base = OTHER; note = guanosine-3'-phosphate
  modified_base 11: mod_base = OTHER; note = guanosine-3'-phosphate
  modified_base 12: mod_base = OTHER; note = cytidine-3'-phosphate
  modified_base 13: mod_base = OTHER; note = cytidine-3'-phosphate
  modified_base 14: mod_base = OTHER; note = uridine-3'-phosphate
  modified_base 15: mod_base = OTHER; note = guanosine-3'-phosphate
  modified_base 16: mod_base = OTHER; note = guanosine-3'-phosphate
  modified_base 17: mod_base = OTHER; note = cytidine-3'-phosphate
  modified_base 18: mod_base = OTHER; note = guanosine-3'-phosphate
  modified_base 19: mod_base = OTHER; note = guanosine-3'-phosphate
  misc_feature 1..19: note = RNA
  misc_feature 20..21: note = DNA
tgattcactggcctggcggtt

SEQ ID NO: 1160 - DNA, 21 bp, synthetic construct
  source 1..21: mol_type = other DNA
  modified_base 1: mod_base = OTHER; note = cytidine-3'-phosphate
  modified_base 2: mod_base = OTHER; note = cytidine-3'-phosphate
  modified_base 3: mod_base = OTHER; note = guanosine-3'-phosphate
  modified_base 4: mod_base = OTHER; note = cytidine-3'-phosphate
  modified_base 5: mod_base = OTHER; note = cytidine-3'-phosphate
  modified_base 6: mod_base = OTHER; note = adenosine-3'-phosphate
  modified_base 7: mod_base = OTHER; note = guanosine-3'-phosphate
  modified_base 8: mod_base = OTHER; note = guanosine-3'-phosphate
  modified_base 9: mod_base = OTHER; note = cytidine-3'-phosphate
  modified_base 10: mod_base = OTHER; note = cytidine-3'-phosphate
  modified_base 11: mod_base = OTHER; note = adenosine-3'-phosphate
  modified_base 12: mod_base = OTHER; note = guanosine-3'-phosphate
  modified_base 13: mod_base = OTHER; note = uridine-3'-phosphate
  modified_base 14: mod_base = OTHER; note = guanosine-3'-phosphate
  modified_base 15: mod_base = OTHER; note = adenosine-3'-phosphate
  modified_base 16: mod_base = OTHER; note = adenosine-3'-phosphate
  modified_base 17: mod_base = OTHER; note = uridine-3'-phosphate
  modified_base 18: mod_base = OTHER; note = cytidine-3'-phosphate
  modified_base 19: mod_base = OTHER; note = adenosine-3'-phosphate
  misc_feature 1..19: note = RNA
  misc_feature 20..21: note = DNA
ccgccaggccagtgaatcatt

SEQ ID NO: 1161 - DNA, 21 bp, synthetic construct
  source 1..21: mol_type = other DNA
  modified_base 1: mod_base = OTHER; note = adenosine-3'-phosphate
  modified_base 2: mod_base = OTHER; note = uridine-3'-phosphate
  modified_base 3: mod_base = OTHER; note = uridine-3'-phosphate
  modified_base 4: mod_base = OTHER; note = cytidine-3'-phosphate
  modified_base 5: mod_base = OTHER; note = adenosine-3'-phosphate
  modified_base 6: mod_base = OTHER; note = cytidine-3'-phosphate
  modified_base 7: mod_base = OTHER; note = uridine-3'-phosphate
  modified_base 8: mod_base = OTHER; note = guanosine-3'-phosphate
  modified_base 9: mod_base = OTHER; note = guanosine-3'-phosphate
  modified_base 10: mod_base = OTHER; note = cytidine-3'-phosphate
  modified_base 11: mod_base = OTHER; note = cytidine-3'-phosphate
  modified_base 12: mod_base = OTHER; note = uridine-3'-phosphate
  modified_base 13: mod_base = OTHER; note = guanosine-3'-phosphate
  modified_base 14: mod_base = OTHER; note = guanosine-3'-phosphate
  modified_base 15: mod_base = OTHER; note = cytidine-3'-phosphate
  modified_base 16: mod_base = OTHER; note = guanosine-3'-phosphate
  modified_base 17: mod_base = OTHER; note = guanosine-3'-phosphate
  modified_base 18: mod_base = OTHER; note = adenosine-3'-phosphate
  modified_base 19: mod_base = OTHER; note = guanosine-3'-phosphate
  misc_feature 1..19: note = RNA
  misc_feature 20..21: note = DNA
attcactggcctggcggagtt

SEQ ID NO: 1162 - DNA, 21 bp, synthetic construct
  source 1..21: mol_type = other DNA
  modified_base 1: mod_base = OTHER; note = cytidine-3'-phosphate
  modified_base 2: mod_base = OTHER; note = uridine-3'-phosphate
  modified_base 3: mod_base = OTHER; note = cytidine-3'-phosphate
  modified_base 4: mod_base = OTHER; note = cytidine-3'-phosphate
  modified_base 5: mod_base = OTHER; note = guanosine-3'-phosphate
  modified_base 6: mod_base = OTHER; note = cytidine-3'-phosphate
  modified_base 7: mod_base = OTHER; note = cytidine-3'-phosphate
  modified_base 8: mod_base = OTHER; note = adenosine-3'-phosphate
  modified_base 9: mod_base = OTHER; note = guanosine-3'-phosphate
  modified_base 10: mod_base = OTHER; note = guanosine-3'-phosphate
  modified_base 11: mod_base = OTHER; note = cytidine-3'-phosphate
  modified_base 12: mod_base = OTHER; note = cytidine-3'-phosphate
  modified_base 13: mod_base = OTHER; note = adenosine-3'-phosphate
  modified_base 14: mod_base = OTHER; note = guanosine-3'-phosphate
  modified_base 15: mod_base = OTHER; note = uridine-3'-phosphate
  modified_base 16: mod_base = OTHER; note = guanosine-3'-phosphate
  modified_base 17: mod_base = OTHER; note = adenosine-3'-phosphate
  modified_base 18: mod_base = OTHER; note = adenosine-3'-phosphate
  modified_base 19: mod_base = OTHER; note = uridine-3'-phosphate
  misc_feature 1..19: note = RNA
  misc_feature 20..21: note = DNA
ctccgccaggccagtgaattt

SEQ ID NO: 1163 - DNA, 21 bp, synthetic construct
  source 1..21: mol_type = other DNA
  modified_base 1: mod_base = OTHER; note = guanosine-3'-phosphate
  modified_base 2: mod_base = OTHER; note = cytidine-3'-phosphate
  modified_base 3: mod_base = OTHER; note = uridine-3'-phosphate
  modified_base 4: mod_base = OTHER; note = uridine-3'-phosphate
  modified_base 5: mod_base = OTHER; note = cytidine-3'-phosphate
  modified_base 6: mod_base = OTHER; note = uridine-3'-phosphate
  modified_base 7: mod_base = OTHER; note = adenosine-3'-phosphate
  modified_base 8: mod_base = OTHER; note = adenosine-3'-phosphate
  modified_base 9: mod_base = OTHER; note = guanosine-3'-phosphate
  modified_base 10: mod_base = OTHER; note = guanosine-3'-phosphate
  modified_base 11: mod_base = OTHER; note = cytidine-3'-phosphate
  modified_base 12: mod_base = OTHER; note = adenosine-3'-phosphate
  modified_base 13: mod_base = OTHER; note = uridine-3'-phosphate
  modified_base 14: mod_base = OTHER; note = guanosine-3'-phosphate
  modified_base 15: mod_base = OTHER; note = guanosine-3'-phosphate
  modified_base 16: mod_base = OTHER; note = uridine-3'-phosphate
  modified_base 17: mod_base = OTHER; note = cytidine-3'-phosphate
  modified_base 18: mod_base = OTHER; note = guanosine-3'-phosphate
  modified_base 19: mod_base = OTHER; note = guanosine-3'-phosphate
  misc_feature 1..19: note = RNA
  misc_feature 20..21: note = DNA
gcttctaaggcatggtcggtt

SEQ ID NO: 1164 - DNA, 21 bp, synthetic construct
  source 1..21: mol_type = other DNA
  modified_base 1: mod_base = OTHER; note = cytidine-3'-phosphate
  modified_base 2: mod_base = OTHER; note = cytidine-3'-phosphate
  modified_base 3: mod_base = OTHER; note = guanosine-3'-phosphate
  modified_base 4: mod_base = OTHER; note = adenosine-3'-phosphate
  modified_base 5: mod_base = OTHER; note = cytidine-3'-phosphate
  modified_base 6: mod_base = OTHER; note = cytidine-3'-phosphate
  modified_base 7: mod_base = OTHER; note = adenosine-3'-phosphate
  modified_base 8: mod_base = OTHER; note = uridine-3'-phosphate
  modified_base 9: mod_base = OTHER; note = guanosine-3'-phosphate
  modified_base 10: mod_base = OTHER; note = cytidine-3'-phosphate
  modified_base 11: mod_base = OTHER; note = cytidine-3'-phosphate
  modified_base 12: mod_base = OTHER; note = uridine-3'-phosphate
  modified_base 13: mod_base = OTHER; note = uridine-3'-phosphate
  modified_base 14: mod_base = OTHER; note = adenosine-3'-phosphate
  modified_base 15: mod_base = OTHER; note = guanosine-3'-phosphate
  modified_base 16: mod_base = OTHER; note = adenosine-3'-phosphate
  modified_base 17: mod_base = OTHER; note = adenosine-3'-phosphate
  modified_base 18: mod_base = OTHER; note = guanosine-3'-phosphate
  modified_base 19: mod_base = OTHER; note = cytidine-3'-phosphate
  misc_feature 1..19: note = RNA
  misc_feature 20..21: note = DNA
ccgaccatgccttagaagctt

SEQ ID NO: 1165 - DNA, 21 bp, synthetic construct
  source 1..21: mol_type = other DNA
  modified_base 1: mod_base = OTHER; note = cytidine-3'-phosphate
  modified_base 2: mod_base = OTHER; note = uridine-3'-phosphate
  modified_base 3: mod_base = OTHER; note = uridine-3'-phosphate
  modified_base 4: mod_base = OTHER; note = cytidine-3'-phosphate
  modified_base 5: mod_base = OTHER; note = uridine-3'-phosphate
  modified_base 6: mod_base = OTHER; note = adenosine-3'-phosphate
  modified_base 7: mod_base = OTHER; note = adenosine-3'-phosphate
  modified_base 8: mod_base = OTHER; note = guanosine-3'-phosphate
  modified_base 9: mod_base = OTHER; note = guanosine-3'-phosphate
  modified_base 10: mod_base = OTHER; note = cytidine-3'-phosphate
  modified_base 11: mod_base = OTHER; note = adenosine-3'-phosphate
  modified_base 12: mod_base = OTHER; note = uridine-3'-phosphate
  modified_base 13: mod_base = OTHER; note = guanosine-3'-phosphate
  modified_base 14: mod_base = OTHER; note = guanosine-3'-phosphate
  modified_base 15: mod_base = OTHER; note = uridine-3'-phosphate
  modified_base 16: mod_base = OTHER; note = cytidine-3'-phosphate
  modified_base 17: mod_base = OTHER; note = guanosine-3'-phosphate
  modified_base 18: mod_base = OTHER; note = guanosine-3'-phosphate
  modified_base 19: mod_base = OTHER; note = guanosine-3'-phosphate
  misc_feature 1..19: note = RNA
  misc_feature 20..21: note = DNA
cttctaaggcatggtcgggtt

SEQ ID NO: 1166 - DNA, 21 bp, synthetic construct
  source 1..21: mol_type = other DNA
  modified_base 1: mod_base = OTHER; note = cytidine-3'-phosphate
  modified_base 2: mod_base = OTHER; note = cytidine-3'-phosphate
  modified_base 3: mod_base = OTHER; note = cytidine-3'-phosphate
  modified_base 4: mod_base = OTHER; note = guanosine-3'-phosphate
  modified_base 5: mod_base = OTHER; note = adenosine-3'-phosphate
  modified_base 6: mod_base = OTHER; note = cytidine-3'-phosphate
  modified_base 7: mod_base = OTHER; note = cytidine-3'-phosphate
  modified_base 8: mod_base = OTHER; note = adenosine-3'-phosphate
  modified_base 9: mod_base = OTHER; note = uridine-3'-phosphate
  modified_base 10: mod_base = OTHER; note = guanosine-3'-phosphate
  modified_base 11: mod_base = OTHER; note = cytidine-3'-phosphate
  modified_base 12: mod_base = OTHER; note = cytidine-3'-phosphate
  modified_base 13: mod_base = OTHER; note = uridine-3'-phosphate
  modified_base 14: mod_base = OTHER; note = uridine-3'-phosphate
  modified_base 15: mod_base = OTHER; note = adenosine-3'-phosphate
  modified_base 16: mod_base = OTHER; note = guanosine-3'-phosphate
  modified_base 17: mod_base = OTHER; note = adenosine-3'-phosphate
  modified_base 18: mod_base = OTHER; note = adenosine-3'-phosphate
  modified_base 19: mod_base = OTHER; note = guanosine-3'-phosphate
  misc_feature 1..19: note = RNA
  misc_feature 20..21: note = DNA
cccgaccatgccttagaagtt

SEQ ID NO: 1167 - DNA, 21 bp, synthetic construct
  source 1..21: mol_type = other DNA
  modified_base 1: mod_base = OTHER; note = guanosine-3'-phosphate
  modified_base 2: mod_base = OTHER; note = adenosine-3'-phosphate
  modified_base 3: mod_base = OTHER; note = guanosine-3'-phosphate
  modified_base 4: mod_base = OTHER; note = guanosine-3'-phosphate
  modified_base 5: mod_base = OTHER; note = guanosine-3'-phosphate
  modified_base 6: mod_base = OTHER; note = cytidine-3'-phosphate
  modified_base 7: mod_base = OTHER; note = cytidine-3'-phosphate
  modified_base 8: mod_base = OTHER; note = adenosine-3'-phosphate
  modified_base 9: mod_base = OTHER; note = adenosine-3'-phosphate
  modified_base 10: mod_base = OTHER; note = cytidine-3'-phosphate
  modified_base 11: mod_base = OTHER; note = adenosine-3'-phosphate
  modified_base 12: mod_base = OTHER; note = adenosine-3'-phosphate
  modified_base 13: mod_base = OTHER; note = cytidine-3'-phosphate
  modified_base 14: mod_base = OTHER; note = uridine-3'-phosphate
  modified_base 15: mod_base = OTHER; note = guanosine-3'-phosphate
  modified_base 16: mod_base = OTHER; note = uridine-3'-phosphate
  modified_base 17: mod_base = OTHER; note = cytidine-3'-phosphate
  modified_base 18: mod_base = OTHER; note = cytidine-3'-phosphate
  modified_base 19: mod_base = OTHER; note = cytidine-3'-phosphate
  misc_feature 1..19: note = RNA
  misc_feature 20..21: note = DNA
gagggccaacaactgtccctt

SEQ ID NO: 1168 - DNA, 21 bp, synthetic construct
  source 1..21: mol_type = other DNA
  modified_base 1: mod_base = OTHER; note = guanosine-3'-phosphate
  modified_base 2: mod_base = OTHER; note = guanosine-3'-phosphate
  modified_base 3: mod_base = OTHER; note = guanosine-3'-phosphate
  modified_base 4: mod_base = OTHER; note = adenosine-3'-phosphate
  modified_base 5: mod_base = OTHER; note = cytidine-3'-phosphate
  modified_base 6: mod_base = OTHER; note = adenosine-3'-phosphate
  modified_base 7: mod_base = OTHER; note = guanosine-3'-phosphate
  modified_base 8: mod_base = OTHER; note = uridine-3'-phosphate
  modified_base 9: mod_base = OTHER; note = uridine-3'-phosphate
  modified_base 10: mod_base = OTHER; note = guanosine-3'-phosphate
  modified_base 11: mod_base = OTHER; note = uridine-3'-phosphate
  modified_base 12: mod_base = OTHER; note = uridine-3'-phosphate
  modified_base 13: mod_base = OTHER; note = guanosine-3'-phosphate
  modified_base 14: mod_base = OTHER; note = guanosine-3'-phosphate
  modified_base 15: mod_base = OTHER; note = cytidine-3'-phosphate
  modified_base 16: mod_base = OTHER; note = cytidine-3'-phosphate
  modified_base 17: mod_base = OTHER; note = cytidine-3'-phosphate
  modified_base 18: mod_base = OTHER; note = uridine-3'-phosphate
  modified_base 19: mod_base = OTHER; note = cytidine-3'-phosphate
  misc_feature 1..19: note = RNA
  misc_feature 20..21: note = DNA
gggacagttgttggccctctt

SEQ ID NO: 1169 - DNA, 21 bp, synthetic construct
  source 1..21: mol_type = other DNA
  modified_base 1: mod_base = OTHER; note = adenosine-3'-phosphate
  modified_base 2: mod_base = OTHER; note = cytidine-3'-phosphate
  modified_base 3: mod_base = OTHER; note = uridine-3'-phosphate
  modified_base 4: mod_base = OTHER; note = guanosine-3'-phosphate
  modified_base 5: mod_base = OTHER; note = uridine-3'-phosphate
  modified_base 6: mod_base = OTHER; note = cytidine-3'-phosphate
  modified_base 7: mod_base = OTHER; note = cytidine-3'-phosphate
  modified_base 8: mod_base = OTHER; note = cytidine-3'-phosphate
  modified_base 9: mod_base = OTHER; note = uridine-3'-phosphate
  modified_base 10: mod_base = OTHER; note = cytidine-3'-phosphate
  modified_base 11: mod_base = OTHER; note = cytidine-3'-phosphate
  modified_base 12: mod_base = OTHER; note = uridine-3'-phosphate
  modified_base 13: mod_base = OTHER; note = uridine-3'-phosphate
  modified_base 14: mod_base = OTHER; note = guanosine-3'-phosphate
  modified_base 15: mod_base = OTHER; note = adenosine-3'-phosphate
  modified_base 16: mod_base = OTHER; note = guanosine-3'-phosphate
  modified_base 17: mod_base = OTHER; note = cytidine-3'-phosphate
  modified_base 18: mod_base = OTHER; note = adenosine-3'-phosphate
  modified_base 19: mod_base = OTHER; note = cytidine-3'-phosphate
  modified_base 20: mod_base = OTHER; note = 2'-deoxythymidine-3'-phosphorothioate
  misc_feature 1..19: note = RNA
  misc_feature 20..21: note = DNA
actgtccctccttgagcactt

SEQ ID NO: 1170 - DNA, 21 bp, synthetic construct
  source 1..21: mol_type = other DNA
  modified_base 1: mod_base = OTHER; note = guanosine-3'-phosphate
  modified_base 2: mod_base = OTHER; note = uridine-3'-phosphate
  modified_base 3: mod_base = OTHER; note = guanosine-3'-phosphate
  modified_base 4: mod_base = OTHER; note = cytidine-3'-phosphate
  modified_base 5: mod_base = OTHER; note = uridine-3'-phosphate
  modified_base 6: mod_base = OTHER; note = cytidine-3'-phosphate
  modified_base 7: mod_base = OTHER; note = adenosine-3'-phosphate
  modified_base 8: mod_base = OTHER; note = adenosine-3'-phosphate
  modified_base 9: mod_base = OTHER; note = guanosine-3'-phosphate
  modified_base 10: mod_base = OTHER; note = guanosine-3'-phosphate
  modified_base 11: mod_base = OTHER; note = adenosine-3'-phosphate
  modified_base 12: mod_base = OTHER; note = guanosine-3'-phosphate
  modified_base 13: mod_base = OTHER; note = guanosine-3'-phosphate
  modified_base 14: mod_base = OTHER; note = guanosine-3'-phosphate
  modified_base 15: mod_base = OTHER; note = adenosine-3'-phosphate
  modified_base 16: mod_base = OTHER; note = cytidine-3'-phosphate
  modified_base 17: mod_base = OTHER; note = adenosine-3'-phosphate
  modified_base 18: mod_base = OTHER; note = guanosine-3'-phosphate
  modified_base 19: mod_base = OTHER; note = uridine-3'-phosphate
  modified_base 20: mod_base = OTHER; note = 2'-deoxythymidine-3'-phosphorothioate
  misc_feature 1..19: note = RNA
  misc_feature 20..21: note = DNA
gtgctcaaggagggacagttt

SEQ ID NO: 1171 - DNA, 21 bp, synthetic construct
  source 1..21: mol_type = other DNA
  modified_base 1: mod_base = OTHER; note = adenosine-3'-phosphate
  modified_base 2: mod_base = OTHER; note = 2'-O-methylcytidine-3'-phosphate
  modified_base 3: mod_base = OTHER; note = 2'-O-methyluridine-3'-phosphate
  modified_base 4: mod_base = OTHER; note = guanosine-3'-phosphate
  modified_base 5: mod_base = OTHER; note = 2'-O-methyluridine-3'-phosphate
  modified_base 6: mod_base = OTHER; note = 2'-O-methylcytidine-3'-phosphate
  modified_base 7: mod_base = OTHER; note = 2'-O-methylcytidine-3'-phosphate
  modified_base 8: mod_base = OTHER; note = 2'-O-methylcytidine-3'-phosphate
  modified_base 9: mod_base = OTHER; note = 2'-O-methyluridine-3'-phosphate
  modified_base 10: mod_base = OTHER; note = 2'-O-methylcytidine-3'-phosphate
  modified_base 11: mod_base = OTHER; note = 2'-O-methylcytidine-3'-phosphate
  modified_base 12: mod_base = OTHER; note = 2'-O-methyluridine-3'-phosphate
  modified_base 13: mod_base = OTHER; note = 2'-O-methyluridine-3'-phosphate
  modified_base 14: mod_base = OTHER; note = guanosine-3'-phosphate
  modified_base 15: mod_base = OTHER; note = adenosine-3'-phosphate
  modified_base 16: mod_base = OTHER; note = guanosine-3'-phosphate
  modified_base 17: mod_base = OTHER; note = 2'-O-methylcytidine-3'-phosphate
  modified_base 18: mod_base = OTHER; note = adenosine-3'-phosphate
  modified_base 19: mod_base = OTHER; note = 2'-O-methylcytidine-3'-phosphate
  modified_base 20: mod_base = OTHER; note = 2'-deoxythymidine-3'-phosphorothioate
  misc_feature 1..19: note = RNA
  misc_feature 20..21: note = DNA
actgtccctccttgagcactt

SEQ ID NO: 1172 - DNA, 21 bp, synthetic construct
  source 1..21: mol_type = other DNA
  modified_base 1: mod_base = OTHER; note = guanosine-3'-phosphate
  modified_base 2: mod_base = OTHER; note = uridine-3'-phosphate
  modified_base 3: mod_base = OTHER; note = guanosine-3'-phosphate
  modified_base 4: mod_base = OTHER; note = cytidine-3'-phosphate
  modified_base 5: mod_base = OTHER; note = uridine-3'-phosphate
  modified_base 6: mod_base = OTHER; note = 2'-O-methylcytidine-3'-phosphate
  modified_base 7: mod_base = OTHER; note = adenosine-3'-phosphate
  modified_base 8: mod_base = OTHER; note = adenosine-3'-phosphate
  modified_base 9: mod_base = OTHER; note = guanosine-3'-phosphate
  modified_base 10: mod_base = OTHER; note = guanosine-3'-phosphate
  modified_base 11: mod_base = OTHER; note = adenosine-3'-phosphate
  modified_base 12: mod_base = OTHER; note = guanosine-3'-phosphate
  modified_base 13: mod_base = OTHER; note = guanosine-3'-phosphate
  modified_base 14: mod_base = OTHER; note = guanosine-3'-phosphate
  modified_base 15: mod_base = OTHER; note = adenosine-3'-phosphate
  modified_base 16: mod_base = OTHER; note = 2'-O-methylcytidine-3'-phosphate
  modified_base 17: mod_base = OTHER; note = adenosine-3'-phosphate
  modified_base 18: mod_base = OTHER; note = guanosine-3'-phosphate
  modified_base 19: mod_base = OTHER; note = uridine-3'-phosphate
  modified_base 20: mod_base = OTHER; note = 2'-deoxythymidine-3'-phosphorothioate
  misc_feature 1..19: note = RNA
  misc_feature 20..21: note = DNA
gtgctcaaggagggacagttt

SEQ ID NO: 1173 - DNA, 21 bp, synthetic construct
  source 1..21: mol_type = other DNA
  modified_base 1: mod_base = OTHER; note = cytidine-3'-phosphate
  modified_base 2: mod_base = OTHER; note = uridine-3'-phosphate
  modified_base 3: mod_base = OTHER; note = guanosine-3'-phosphate
  modified_base 4: mod_base = OTHER; note = uridine-3'-phosphate
  modified_base 5: mod_base = OTHER; note = cytidine-3'-phosphate
  modified_base 6: mod_base = OTHER; note = cytidine-3'-phosphate
  modified_base 7: mod_base = OTHER; note = cytidine-3'-phosphate
  modified_base 8: mod_base = OTHER; note = uridine-3'-phosphate
  modified_base 9: mod_base = OTHER; note = cytidine-3'-phosphate
  modified_base 10: mod_base = OTHER; note = cytidine-3'-phosphate
  modified_base 11: mod_base = OTHER; note = uridine-3'-phosphate
  modified_base 12: mod_base = OTHER; note = uridine-3'-phosphate
  modified_base 13: mod_base = OTHER; note = guanosine-3'-phosphate
  modified_base 14: mod_base = OTHER; note = adenosine-3'-phosphate
  modified_base 15: mod_base = OTHER; note = guanosine-3'-phosphate
  modified_base 16: mod_base = OTHER; note = cytidine-3'-phosphate
  modified_base 17: mod_base = OTHER; note = adenosine-3'-phosphate
  modified_base 18: mod_base = OTHER; note = cytidine-3'-phosphate
  modified_base 19: mod_base = OTHER; note = cytidine-3'-phosphate
  modified_base 20: mod_base = OTHER; note = 2'-deoxythymidine-3'-phosphorothioate
  misc_feature 1..19: note = RNA
  misc_feature 20..21: note = DNA
ctgtccctccttgagcacctt

SEQ ID NO: 1174 - DNA, 21 bp, synthetic construct
  source 1..21: mol_type = other DNA
  modified_base 1: mod_base = OTHER; note = guanosine-3'-phosphate
  modified_base 2: mod_base = OTHER; note = guanosine-3'-phosphate
  modified_base 3: mod_base = OTHER; note = uridine-3'-phosphate
  modified_base 4: mod_base = OTHER; note = guanosine-3'-phosphate
  modified_base 5: mod_base = OTHER; note = cytidine-3'-phosphate
  modified_base 6: mod_base = OTHER; note = uridine-3'-phosphate
  modified_base 7: mod_base = OTHER; note = cytidine-3'-phosphate
  modified_base 8: mod_base = OTHER; note = adenosine-3'-phosphate
  modified_base 9: mod_base = OTHER; note = adenosine-3'-phosphate
  modified_base 10: mod_base = OTHER; note = guanosine-3'-phosphate
  modified_base 11: mod_base = OTHER; note = guanosine-3'-phosphate
  modified_base 12: mod_base = OTHER; note = adenosine-3'-phosphate
  modified_base 13: mod_base = OTHER; note = guanosine-3'-phosphate
  modified_base 14: mod_base = OTHER; note = guanosine-3'-phosphate
  modified_base 15: mod_base = OTHER; note = guanosine-3'-phosphate
  modified_base 16: mod_base = OTHER; note = adenosine-3'-phosphate
  modified_base 17: mod_base = OTHER; note = cytidine-3'-phosphate
  modified_base 18: mod_base = OTHER; note = adenosine-3'-phosphate
  modified_base 19: mod_base = OTHER; note = guanosine-3'-phosphate
  modified_base 20: mod_base = OTHER; note = 2'-deoxythymidine-3'-phosphorothioate
  misc_feature 1..19: note = RNA
  misc_feature 20..21: note = DNA
ggtgctcaaggagggacagtt

SEQ ID NO: 1175 - DNA, 21 bp, synthetic construct
  source 1..21: mol_type = other DNA
  modified_base 1: mod_base = OTHER; note = 2'-O-methylcytidine-3'-phosphate
  modified_base 2: mod_base = OTHER; note = 2'-O-methyluridine-3'-phosphate
  modified_base 3: mod_base = OTHER; note = guanosine-3'-phosphate
  modified_base 4: mod_base = OTHER; note = 2'-O-methyluridine-3'-phosphate
  modified_base 5: mod_base = OTHER; note = 2'-O-methylcytidine-3'-phosphate
  modified_base 6: mod_base = OTHER; note = 2'-O-methylcytidine-3'-phosphate
  modified_base 7: mod_base = OTHER; note = 2'-O-methylcytidine-3'-phosphate
  modified_base 8: mod_base = OTHER; note = 2'-O-methyluridine-3'-phosphate
  modified_base 9: mod_base = OTHER; note = 2'-O-methylcytidine-3'-phosphate
  modified_base 10: mod_base = OTHER; note = 2'-O-methylcytidine-3'-phosphate
  modified_base 11: mod_base = OTHER; note = 2'-O-methyluridine-3'-phosphate
  modified_base 12: mod_base = OTHER; note = 2'-O-methyluridine-3'-phosphate
  modified_base 13: mod_base = OTHER; note = guanosine-3'-phosphate
  modified_base 14: mod_base = OTHER; note = adenosine-3'-phosphate
  modified_base 15: mod_base = OTHER; note = guanosine-3'-phosphate
  modified_base 16: mod_base = OTHER; note = 2'-O-methylcytidine-3'-phosphate
  modified_base 17: mod_base = OTHER; note = adenosine-3'-phosphate
  modified_base 18: mod_base = OTHER; note = 2'-O-methylcytidine-3'-phosphate
  modified_base 19: mod_base = OTHER; note = 2'-O-methylcytidine-3'-phosphate
  modified_base 20: mod_base = OTHER; note = 2'-deoxythymidine-3'-phosphorothioate
  misc_feature 1..19: note = RNA
  misc_feature 20..21: note = DNA
ctgtccctccttgagcacctt

SEQ ID NO: 1176 - DNA, 21 bp, synthetic construct
  source 1..21: mol_type = other DNA
  modified_base 1: mod_base = OTHER; note = guanosine-3'-phosphate
  modified_base 2: mod_base = OTHER; note = guanosine-3'-phosphate
  modified_base 3: mod_base = OTHER; note = uridine-3'-phosphate
  modified_base 4: mod_base = OTHER; note = guanosine-3'-phosphate
  modified_base 5: mod_base = OTHER; note = cytidine-3'-phosphate
  modified_base 6: mod_base = OTHER; note = uridine-3'-phosphate
  modified_base 7: mod_base = OTHER; note = 2'-O-methylcytidine-3'-phosphate
  modified_base 8: mod_base = OTHER; note = adenosine-3'-phosphate
  modified_base 9: mod_base = OTHER; note = adenosine-3'-phosphate
  modified_base 10: mod_base = OTHER; note = guanosine-3'-phosphate
  modified_base 11: mod_base = OTHER; note = guanosine-3'-phosphate
  modified_base 12: mod_base = OTHER; note = adenosine-3'-phosphate
  modified_base 13: mod_base = OTHER; note = guanosine-3'-phosphate
  modified_base 14: mod_base = OTHER; note = guanosine-3'-phosphate
  modified_base 15: mod_base = OTHER; note = guanosine-3'-phosphate
  modified_base 16: mod_base = OTHER; note = adenosine-3'-phosphate
  modified_base 17: mod_base = OTHER; note = 2'-O-methylcytidine-3'-phosphate
  modified_base 18: mod_base = OTHER; note = adenosine-3'-phosphate
  modified_base 19: mod_base = OTHER; note = guanosine-3'-phosphate
  modified_base 20: mod_base = OTHER; note = 2'-deoxythymidine-3'-phosphorothioate
  misc_feature 1..19: note = RNA
  misc_feature 20..21: note = DNA
ggtgctcaaggagggacagtt

SEQ ID NO: 1177 - DNA, 21 bp, synthetic construct
  source 1..21: mol_type = other DNA
  modified_base 1: mod_base = OTHER; note = adenosine-3'-phosphate
  modified_base 2: mod_base = OTHER; note = cytidine-3'-phosphate
  modified_base 3: mod_base = OTHER; note = adenosine-3'-phosphate
  modified_base 4: mod_base = OTHER; note = uridine-3'-phosphate
  modified_base 5: mod_base = OTHER; note = uridine-3'-phosphate
  modified_base 6: mod_base = OTHER; note = uridine-3'-phosphate
  modified_base 7: mod_base = OTHER; note = adenosine-3'-phosphate
  modified_base 8: mod_base = OTHER; note = uridine-3'-phosphate
  modified_base 9: mod_base = OTHER; note = cytidine-3'-phosphate
  modified_base 10: mod_base = OTHER; note = uridine-3'-phosphate
  modified_base 11: mod_base = OTHER; note = uridine-3'-phosphate
  modified_base 12: mod_base = OTHER; note = uridine-3'-phosphate
  modified_base 13: mod_base = OTHER; note = uridine-3'-phosphate
  modified_base 14: mod_base = OTHER; note = guanosine-3'-phosphate
  modified_base 15: mod_base = OTHER; note = guanosine-3'-phosphate
  modified_base 16: mod_base = OTHER; note = guanosine-3'-phosphate
  modified_base 17: mod_base = OTHER; note = uridine-3'-phosphate
  modified_base 18: mod_base = OTHER; note = cytidine-3'-phosphate
  modified_base 19: mod_base = OTHER; note = uridine-3'-phosphate
  modified_base 20: mod_base = OTHER; note = 2'-deoxythymidine-3'-phosphorothioate
  misc_feature 1..19: note = RNA
  misc_feature 20..21: note = DNA
acatttatcttttgggtcttt

SEQ ID NO: 1178 - DNA, 21 bp, synthetic construct
  source 1..21: mol_type = other DNA
  modified_base 1: mod_base = OTHER; note = adenosine-3'-phosphate
  modified_base 2: mod_base = OTHER; note = guanosine-3'-phosphate
  modified_base 3: mod_base = OTHER; note = adenosine-3'-phosphate
  modified_base 4: mod_base = OTHER; note = cytidine-3'-phosphate
  modified_base 5: mod_base = OTHER; note = cytidine-3'-phosphate
  modified_base 6: mod_base = OTHER; note = cytidine-3'-phosphate
  modified_base 7: mod_base = OTHER; note = adenosine-3'-phosphate
  modified_base 8: mod_base = OTHER; note = adenosine-3'-phosphate
  modified_base 9: mod_base = OTHER; note = adenosine-3'-phosphate
  modified_base 10: mod_base = OTHER; note = adenosine-3'-phosphate
  modified_base 11: mod_base = OTHER; note = guanosine-3'-phosphate
  modified_base 12: mod_base = OTHER; note = adenosine-3'-phosphate
  modified_base 13: mod_base = OTHER; note = uridine-3'-phosphate
  modified_base 14: mod_base = OTHER; note = adenosine-3'-phosphate
  modified_base 15: mod_base = OTHER; note = adenosine-3'-phosphate
  modified_base 16: mod_base = OTHER; note = adenosine-3'-phosphate
  modified_base 17: mod_base = OTHER; note = uridine-3'-phosphate
  modified_base 18: mod_base = OTHER; note = guanosine-3'-phosphate
  modified_base 19: mod_base = OTHER; note = uridine-3'-phosphate
  modified_base 20: mod_base = OTHER; note = 2'-deoxythymidine-3'-phosphorothioate
  misc_feature 1..19: note = RNA
  misc_feature 20..21: note = DNA
agacccaaaagataaatgttt

SEQ ID NO: 1179 - DNA, 21 bp, synthetic construct
  source 1..21: mol_type = other DNA
  modified_base 1: mod_base = OTHER; note = adenosine-3'-phosphate
  modified_base 2: mod_base = OTHER; note = 2'-O-methylcytidine-3'-phosphate
  modified_base 3: mod_base = OTHER; note = adenosine-3'-phosphate
  modified_base 4: mod_base = OTHER; note = 2'-O-methyluridine-3'-phosphate
  modified_base 5: mod_base = OTHER; note = 2'-O-methyluridine-3'-phosphate
  modified_base 6: mod_base = OTHER; note = 2'-O-methyluridine-3'-phosphate
  modified_base 7: mod_base = OTHER; note = adenosine-3'-phosphate
  modified_base 8: mod_base = OTHER; note = 2'-O-methyluridine-3'-phosphate
  modified_base 9: mod_base = OTHER; note = 2'-O-methylcytidine-3'-phosphate
  modified_base 10: mod_base = OTHER; note = 2'-O-methyluridine-3'-phosphate
  modified_base 11: mod_base = OTHER; note = 2'-O-methyluridine-3'-phosphate
  modified_base 12: mod_base = OTHER; note = 2'-O-methyluridine-3'-phosphate
  modified_base 13: mod_base = OTHER; note = 2'-O-methyluridine-3'-phosphate
  modified_base 14: mod_base = OTHER; note = guanosine-3'-phosphate
  modified_base 15: mod_base = OTHER; note = guanosine-3'-phosphate
  modified_base 16: mod_base = OTHER; note = guanosine-3'-phosphate
  modified_base 17: mod_base = OTHER; note = 2'-O-methyluridine-3'-phosphate
  modified_base 18: mod_base = OTHER; note = 2'-O-methylcytidine-3'-phosphate
  modified_base 19: mod_base = OTHER; note = 2'-O-methyluridine-3'-phosphate
  modified_base 20: mod_base = OTHER; note = 2'-deoxythymidine-3'-phosphorothioate
  misc_feature 1..19: note = RNA
  misc_feature 20..21: note = DNA
acatttatcttttgggtcttt

SEQ ID NO: 1180 - DNA, 21 bp, synthetic construct
  source 1..21: mol_type = other DNA
  modified_base 1: mod_base = OTHER; note = adenosine-3'-phosphate
  modified_base 2: mod_base = OTHER; note = guanosine-3'-phosphate
  modified_base 3: mod_base = OTHER; note = adenosine-3'-phosphate
  modified_base 4: mod_base = OTHER; note = cytidine-3'-phosphate
  modified_base 5: mod_base = OTHER; note = cytidine-3'-phosphate
  modified_base 6: mod_base = OTHER; note = 2'-O-methylcytidine-3'-phosphate
  modified_base 7: mod_base = OTHER; note = adenosine-3'-phosphate
  modified_base 8: mod_base = OTHER; note = adenosine-3'-phosphate
  modified_base 9: mod_base = OTHER; note = adenosine-3'-phosphate
  modified_base 10: mod_base = OTHER; note = adenosine-3'-phosphate
  modified_base 11: mod_base = OTHER; note = guanosine-3'-phosphate
  modified_base 12: mod_base = OTHER; note = adenosine-3'-phosphate
  modified_base 13: mod_base = OTHER; note = 2'-O-methyluridine-3'-phosphate
  modified_base 14: mod_base = OTHER; note = adenosine-3'-phosphate
  modified_base 15: mod_base = OTHER; note = adenosine-3'-phosphate
  modified_base 16: mod_base = OTHER; note = adenosine-3'-phosphate
  modified_base 17: mod_base = OTHER; note = uridine-3'-phosphate
  modified_base 18: mod_base = OTHER; note = guanosine-3'-phosphate
  modified_base 19: mod_base = OTHER; note = uridine-3'-phosphate
  modified_base 20: mod_base = OTHER; note = 2'-deoxythymidine-3'-phosphorothioate
  misc_feature 1..19: note = RNA
  misc_feature 20..21: note = DNA
agacccaaaagataaatgttt

SEQ ID NO: 1181 - DNA, 21 bp, synthetic construct
  source 1..21: mol_type = other DNA
  modified_base 1: mod_base = OTHER; note = 2'-deoxy-2'-fluoroadenosine-3'-phosphate
  modified_base 2: mod_base = OTHER; note = 2'-O-methylcytidine-3'-phosphate
  modified_base 3: mod_base = OTHER; note = 2'-deoxy-2'-fluoroadenosine-3'-phosphate
  modified_base 4: mod_base = OTHER; note = 2'-O-methyluridine-3'-phosphate
  modified_base 5: mod_base = OTHER; note = 2'-deoxy-2'-fluorouridine-3'-phosphate
  modified_base 6: mod_base = OTHER; note = 2'-O-methyluridine-3'-phosphate
  modified_base 7: mod_base = OTHER; note = 2'-deoxy-2'-fluoroadenosine-3'-phosphate
  modified_base 8: mod_base = OTHER; note = 2'-O-methyluridine-3'-phosphate
  modified_base 9: mod_base = OTHER; note = 2'-deoxy-2'-fluorocytidine-3'-phosphate
  modified_base 10: mod_base = OTHER; note = 2'-O-methyluridine-3'-phosphate
  modified_base 11: mod_base = OTHER; note = 2'-deoxy-2'-fluorouridine-3'-phosphate
  modified_base 12: mod_base = OTHER; note = 2'-O-methyluridine-3'-phosphate
  modified_base 13: mod_base = OTHER; note = 2'-deoxy-2'-fluorouridine-3'-phosphate
  modified_base 14: mod_base = OTHER; note = 2'-O-methylguanosine-3'-phosphate
  modified_base 15: mod_base = OTHER; note = 2'-deoxy-2'-fluoroguanosine-3'-phosphate
  modified_base 16: mod_base = OTHER; note = 2'-O-methylguanosine-3'-phosphate
  modified_base 17: mod_base = OTHER; note = 2'-deoxy-2'-fluorouridine-3'-phosphate
  modified_base 18: mod_base = OTHER; note = 2'-O-methylcytidine-3'-phosphate
  modified_base 19: mod_base = OTHER; note = 2'-deoxy-2'-fluorouridine-3'-phosphate
  modified_base 20: mod_base = OTHER; note = 2'-deoxythymidine-3'-phosphorothioate
  misc_feature 1..19: note = RNA
  misc_feature 20..21: note = DNA
acatttatcttttgggtcttt

SEQ ID NO: 1182 - DNA, 21 bp, synthetic construct
  source 1..21: mol_type = other DNA
  modified_base 1: mod_base = OTHER; note = 2'-O-methyladenosine-3'-phosphate 5'phosphate
  modified_base 2: mod_base = OTHER; note = 2'-deoxy-2'-fluoroguanosine-3'-phosphate
  modified_base 3: mod_base = OTHER; note = 2'-O-methyladenosine-3'-phosphate
  modified_base 4: mod_base = OTHER; note = 2'-deoxy-2'-fluorocytidine-3'-phosphate
  modified_base 5: mod_base = OTHER; note = 2'-O-methylcytidine-3'-phosphate
  modified_base 6: mod_base = OTHER; note = 2'-deoxy-2'-fluorocytidine-3'-phosphate
  modified_base 7: mod_base = OTHER; note = 2'-O-methyladenosine-3'-phosphate
  modified_base 8: mod_base = OTHER; note = 2'-deoxy-2'-fluoroadenosine-3'-phosphate
  modified_base 9: mod_base = OTHER; note = 2'-O-methyladenosine-3'-phosphate
  modified_base 10: mod_base = OTHER; note = 2'-deoxy-2'-fluoroadenosine-3'-phosphate
  modified_base 11: mod_base = OTHER; note = 2'-O-methylguanosine-3'-phosphate
  modified_base 12: mod_base = OTHER; note = 2'-deoxy-2'-fluoroadenosine-3'-phosphate
  modified_base 13: mod_base = OTHER; note = 2'-O-methyluridine-3'-phosphate
  modified_base 14: mod_base = OTHER; note = 2'-deoxy-2'-fluoroadenosine-3'-phosphate
  modified_base 15: mod_base = OTHER; note = 2'-O-methyladenosine-3'-phosphate
  modified_base 16: mod_base = OTHER; note = 2'-deoxy-2'-fluoroadenosine-3'-phosphate
  modified_base 17: mod_base = OTHER; note = 2'-O-methyluridine-3'-phosphate
  modified_base 18: mod_base = OTHER; note = 2'-deoxy-2'-fluoroguanosine-3'-phosphate
  modified_base 19: mod_base = OTHER; note = 2'-O-methyluridine-3'-phosphate
  modified_base 20: mod_base = OTHER; note = 2'-deoxythymidine-3'-phosphorothioate
  misc_feature 1..19: note = RNA
  misc_feature 20..21: note = DNA
agacccaaaagataaatgttt

SEQ ID NO: 1183 - DNA, 21 bp, synthetic construct
  source 1..21: mol_type = other DNA
  modified_base 1: mod_base = OTHER; note = adenosine-3'-phosphate
  modified_base 2: mod_base = OTHER; note = 2'-deoxy-2'-fluorocytidine-3'-phosphate
  modified_base 3: mod_base = OTHER; note = adenosine-3'-phosphate
  modified_base 4: mod_base = OTHER; note = 2'-deoxy-2'-fluorouridine-3'-phosphate
  modified_base 5: mod_base = OTHER; note = 2'-deoxy-2'-fluorouridine-3'-phosphate
  modified_base 6: mod_base = OTHER; note = 2'-deoxy-2'-fluorouridine-3'-phosphate
  modified_base 7: mod_base = OTHER; note = adenosine-3'-phosphate
  modified_base 8: mod_base = OTHER; note = 2'-deoxy-2'-fluorouridine-3'-phosphate
  modified_base 9: mod_base = OTHER; note = 2'-deoxy-2'-fluorocytidine-3'-phosphate
  modified_base 10: mod_base = OTHER; note = 2'-deoxy-2'-fluorouridine-3'-phosphate
  modified_base 11: mod_base = OTHER; note = 2'-deoxy-2'-fluorouridine-3'-phosphate
  modified_base 12: mod_base = OTHER; note = 2'-deoxy-2'-fluorouridine-3'-phosphate
  modified_base 13: mod_base = OTHER; note = 2'-deoxy-2'-fluorouridine-3'-phosphate
  modified_base 14: mod_base = OTHER; note = guanosine-3'-phosphate
  modified_base 15: mod_base = OTHER; note = guanosine-3'-phosphate
  modified_base 16: mod_base = OTHER; note = guanosine-3'-phosphate
  modified_base 17: mod_base = OTHER; note = 2'-deoxy-2'-fluorouridine-3'-phosphate
  modified_base 18: mod_base = OTHER; note = 2'-deoxy-2'-fluorocytidine-3'-phosphate
  modified_base 19: mod_base = OTHER; note = 2'-deoxy-2'-fluorouridine-3'-phosphate
  modified_base 20: mod_base = OTHER; note = 2'-deoxythymidine-3'-phosphorothioate
  misc_feature 1..19: note = RNA
  misc_feature 20..21: note = DNA
acatttatcttttgggtcttt

SEQ ID NO: 1184 - DNA, 21 bp, synthetic construct
  source 1..21: mol_type = other DNA
  modified_base 1: mod_base = OTHER; note = adenosine-3'-phosphate
  modified_base 2: mod_base = OTHER; note = guanosine-3'-phosphate
  modified_base 3: mod_base = OTHER; note = adenosine-3'-phosphate
  modified_base 4: mod_base = OTHER; note = 2'-deoxy-2'-fluorocytidine-3'-phosphate
  modified_base 5: mod_base = OTHER; note = 2'-deoxy-2'-fluorocytidine-3'-phosphate
  modified_base 6: mod_base = OTHER; note = 2'-deoxy-2'-fluorocytidine-3'-phosphate
  modified_base 7: mod_base = OTHER; note = adenosine-3'-phosphate
  modified_base 8: mod_base = OTHER; note = adenosine-3'-phosphate
  modified_base 9: mod_base = OTHER; note = adenosine-3'-phosphate
  modified_base 10: mod_base = OTHER; note = adenosine-3'-phosphate
  modified_base 11: mod_base = OTHER; note = guanosine-3'-phosphate
  modified_base 12: mod_base = OTHER; note = adenosine-3'-phosphate
  modified_base 13: mod_base = OTHER; note = 2'-deoxy-2'-fluorouridine-3'-phosphate
  modified_base 14: mod_base = OTHER; note = adenosine-3'-phosphate
  modified_base 15: mod_base = OTHER; note = adenosine-3'-phosphate
  modified_base 16: mod_base = OTHER; note = adenosine-3'-phosphate
  modified_base 17: mod_base = OTHER; note = 2'-deoxy-2'-fluorouridine-3'-phosphate
  modified_base 18: mod_base = OTHER; note = guanosine-3'-phosphate
  modified_base 19: mod_base = OTHER; note = 2'-deoxy-2'-fluorouridine-3'-phosphate
  modified_base 20: mod_base = OTHER; note = 2'-deoxythymidine-3'-phosphorothioate
  misc_feature 1..19: note = RNA
  misc_feature 20..21: note = DNA
agacccaaaagataaatgttt

SEQ ID NO: 1185 - DNA, 21 bp, synthetic construct
  source 1..21: mol_type = other DNA
  modified_base 1: mod_base = OTHER; note = adenosine-3'-phosphate
  modified_base 2: mod_base = OTHER; note = 2'-O-methylcytidine-3'-phosphate
  modified_base 3: mod_base = OTHER; note = adenosine-3'-phosphate
  modified_base 4: mod_base = OTHER; note = 2'-O-methyluridine-3'-phosphate
  modified_base 5: mod_base = OTHER; note = uridine-3'-phosphate
  modified_base 6: mod_base = OTHER; note = 2'-O-methyluridine-3'-phosphate
  modified_base 7: mod_base = OTHER; note = adenosine-3'-phosphate
  modified_base 8: mod_base = OTHER; note = 2'-O-methyluridine-3'-phosphate
  modified_base 9: mod_base = OTHER; note = cytidine-3'-phosphate
  modified_base 10: mod_base = OTHER; note = 2'-O-methyluridine-3'-phosphate
  modified_base 11: mod_base = OTHER; note = uridine-3'-phosphate
  modified_base 12: mod_base = OTHER; note = 2'-O-methyluridine-3'-phosphate
  modified_base 13: mod_base = OTHER; note = uridine-3'-phosphate
  modified_base 14: mod_base = OTHER; note = 2'-O-methylguanosine-3'-phosphate
  modified_base 15: mod_base = OTHER; note = guanosine-3'-phosphate
  modified_base 16: mod_base = OTHER; note = 2'-O-methylguanosine-3'-phosphate
  modified_base 17: mod_base = OTHER; note = uridine-3'-phosphate
  modified_base 18: mod_base = OTHER; note = 2'-O-methylcytidine-3'-phosphate
  modified_base 19: mod_base = OTHER; note = uridine-3'-phosphate
  modified_base 20: mod_base = OTHER; note = 2'-deoxythymidine-3'-phosphorothioate
  misc_feature 1..19: note = RNA
  misc_feature 20..21: note = DNA
acatttatcttttgggtcttt

SEQ ID NO: 1186 - DNA, 21 bp, synthetic construct
  source 1..21: mol_type = other DNA
  modified_base 1: mod_base = OTHER; note = 2'-O-methyladenosine-3'-phosphate 5'phosphate
  modified_base 2: mod_base = OTHER; note = 2'-deoxy-2'-fluoroguanosine-3'-phosphate
  modified_base 3: mod_base = OTHER; note = 2'-O-methyladenosine-3'-phosphate
  modified_base 4: mod_base = OTHER; note = 2'-deoxy-2'-fluorocytidine-3'-phosphate
  modified_base 5: mod_base = OTHER; note = 2'-O-methylcytidine-3'-phosphate
  modified_base 6: mod_base = OTHER; note = 2'-deoxy-2'-fluorocytidine-3'-phosphate
  modified_base 7: mod_base = OTHER; note = 2'-O-methyladenosine-3'-phosphate
  modified_base 8: mod_base = OTHER; note = 2'-deoxy-2'-fluoroadenosine-3'-phosphate
  modified_base 9: mod_base = OTHER; note = 2'-O-methyladenosine-3'-phosphate
  modified_base 10: mod_base = OTHER; note = 2'-deoxy-2'-fluoroadenosine-3'-phosphate
  modified_base 11: mod_base = OTHER; note = 2'-O-methylguanosine-3'-phosphate
  modified_base 12: mod_base = OTHER; note = 2'-deoxy-2'-fluoroadenosine-3'-phosphate
  modified_base 13: mod_base = OTHER; note = 2'-O-methyluridine-3'-phosphate
  modified_base 14: mod_base = OTHER; note = 2'-deoxy-2'-fluoroadenosine-3'-phosphate
  modified_base 15: mod_base = OTHER; note = 2'-O-methyladenosine-3'-phosphate
  modified_base 16: mod_base = OTHER; note = 2'-deoxy-2'-fluoroadenosine-3'-phosphate
  modified_base 17: mod_base = OTHER; note = 2'-O-methyluridine-3'-phosphate
  modified_base 18: mod_base = OTHER; note = 2'-deoxy-2'-fluoroguanosine-3'-phosphate
  modified_base 19: mod_base = OTHER; note = 2'-O-methyluridine-3'-phosphate
  modified_base 20: mod_base = OTHER; note = 2'-deoxythymidine-3'-phosphorothioate
  misc_feature 1..19: note = RNA
  misc_feature 20..21: note = DNA
agacccaaaagataaatgttt

SEQ ID NO: 1187 - DNA, 21 bp, synthetic construct
  source 1..21: mol_type = other DNA
  modified_base 1: mod_base = OTHER; note = adenosine-3'-phosphate
  modified_base 2: mod_base = OTHER; note = 2'-O-methylcytidine-3'-phosphate
  modified_base 3: mod_base = OTHER; note = adenosine-3'-phosphate
  modified_base 4: mod_base = OTHER; note = 2'-O-methyluridine-3'-phosphate
  modified_base 5: mod_base = OTHER; note = uridine-3'-phosphate
  modified_base 6: mod_base = OTHER; note = 2'-O-methyluridine-3'-phosphate
  modified_base 7: mod_base = OTHER; note = adenosine-3'-phosphate
  modified_base 8: mod_base = OTHER; note = 2'-O-methyluridine-3'-phosphate
  modified_base 9: mod_base = OTHER; note = cytidine-3'-phosphate
  modified_base 10: mod_base = OTHER; note = 2'-O-methyluridine-3'-phosphate
  modified_base 11: mod_base = OTHER; note = uridine-3'-phosphate
  modified_base 12: mod_base = OTHER; note = 2'-O-methyluridine-3'-phosphate
  modified_base 13: mod_base = OTHER; note = uridine-3'-phosphate
  modified_base 14: mod_base = OTHER; note = 2'-O-methylguanosine-3'-phosphate
  modified_base 15: mod_base = OTHER; note = guanosine-3'-phosphate
  modified_base 16: mod_base = OTHER; note = 2'-O-methylguanosine-3'-phosphate
  modified_base 17: mod_base = OTHER; note = uridine-3'-phosphate
  modified_base 18: mod_base = OTHER; note = 2'-O-methylcytidine-3'-phosphate
  modified_base 19: mod_base = OTHER; note = uridine-3'-phosphate
  modified_base 20: mod_base = OTHER; note = 2'-deoxythymidine-3'-phosphorothioate
  misc_feature 1..19: note = RNA
  misc_feature 20..21: note = DNA
acatttatcttttgggtcttt

SEQ ID NO: 1188 - DNA, 21 bp, synthetic construct
  source 1..21: mol_type = other DNA
  modified_base 1: mod_base = OTHER; note = adenosine-3'-phosphate
  modified_base 2: mod_base = OTHER; note = guanosine-3'-phosphate
  modified_base 3: mod_base = OTHER; note = adenosine-3'-phosphate
  modified_base 4: mod_base = OTHER; note = 2'-deoxy-2'-fluorocytidine-3'-phosphate
  modified_base 5: mod_base = OTHER; note = 2'-deoxy-2'-fluorocytidine-3'-phosphate
  modified_base 6: mod_base = OTHER; note = 2'-deoxy-2'-fluorocytidine-3'-phosphate
  modified_base 7: mod_base = OTHER; note = adenosine-3'-phosphate
  modified_base 8: mod_base = OTHER; note = adenosine-3'-phosphate
  modified_base 9: mod_base = OTHER; note = adenosine-3'-phosphate
  modified_base 10: mod_base = OTHER; note = adenosine-3'-phosphate
  modified_base 11: mod_base = OTHER; note = guanosine-3'-phosphate
  modified_base 12: mod_base = OTHER; note = adenosine-3'-phosphate
  modified_base 13: mod_base = OTHER; note = 2'-deoxy-2'-fluorouridine-3'-phosphate
  modified_base 14: mod_base = OTHER; note = adenosine-3'-phosphate
  modified_base 15: mod_base = OTHER; note = adenosine-3'-phosphate
  modified_base 16: mod_base = OTHER; note = adenosine-3'-phosphate
  modified_base 17: mod_base = OTHER; note = 2'-deoxy-2'-fluorouridine-3'-phosphate
  modified_base 18: mod_base = OTHER; note = guanosine-3'-phosphate
  modified_base 19: mod_base = OTHER; note = 2'-deoxy-2'-fluorouridine-3'-phosphate
  modified_base 20: mod_base = OTHER; note = 2'-deoxythymidine-3'-phosphorothioate
  misc_feature 1..19: note = RNA
  misc_feature 20..21: note = DNA
agacccaaaagataaatgttt

SEQ ID NO: 1189 - DNA, 21 bp, synthetic construct
  source 1..21: mol_type = other DNA
  modified_base 1: mod_base = OTHER; note = 2'-deoxy-2'-fluoroadenosine-3'-phosphate
  modified_base 2: mod_base = OTHER; note = 2'-O-methylcytidine-3'-phosphate
  modified_base 3: mod_base = OTHER; note = 2'-deoxy-2'-fluoroadenosine-3'-phosphate
  modified_base 4: mod_base = OTHER; note = 2'-O-methyluridine-3'-phosphate
  modified_base 5: mod_base = OTHER; note = 2'-deoxy-2'-fluorouridine-3'-phosphate
  modified_base 6: mod_base = OTHER; note = 2'-O-methyluridine-3'-phosphate
  modified_base 7: mod_base = OTHER; note = 2'-deoxy-2'-fluoroadenosine-3'-phosphate
  modified_base 8: mod_base = OTHER; note = 2'-O-methyluridine-3'-phosphate
  modified_base 9: mod_base = OTHER; note = 2'-deoxy-2'-fluorocytidine-3'-phosphate
  modified_base 10: mod_base = OTHER; note = 2'-O-methyluridine-3'-phosphate
  modified_base 11: mod_base = OTHER; note = 2'-deoxy-2'-fluorouridine-3'-phosphate
  modified_base 12: mod_base = OTHER; note = 2'-O-methyluridine-3'-phosphate
  modified_base 13: mod_base = OTHER; note = 2'-deoxy-2'-fluorouridine-3'-phosphate
  modified_base 14: mod_base = OTHER; note = 2'-O-methylguanosine-3'-phosphate
  modified_base 15: mod_base = OTHER; note = 2'-deoxy-2'-fluoroguanosine-3'-phosphate
  modified_base 16: mod_base = OTHER; note = 2'-O-methylguanosine-3'-phosphate
  modified_base 17: mod_base = OTHER; note = 2'-deoxy-2'-fluorouridine-3'-phosphate
  modified_base 18: mod_base = OTHER; note = 2'-O-methylcytidine-3'-phosphate
  modified_base 19: mod_base = OTHER; note = 2'-deoxy-2'-fluorouridine-3'-phosphate
  modified_base 20: mod_base = OTHER; note = 2'-deoxythymidine-3'-phosphorothioate
  misc_feature 1..19: note = RNA
  misc_feature 20..21: note = DNA
acatttatcttttgggtcttt

SEQ ID NO: 1190 - DNA, 21 bp, synthetic construct
  source 1..21: mol_type = other DNA
  modified_base 1: mod_base = OTHER; note = adenosine-3'-phosphate
  modified_base 2: mod_base = OTHER; note = guanosine-3'-phosphate
  modified_base 3: mod_base = OTHER; note = adenosine-3'-phosphate
  modified_base 4: mod_base = OTHER; note = cytidine-3'-phosphate
  modified_base 5: mod_base = OTHER; note = cytidine-3'-phosphate
  modified_base 6: mod_base = OTHER; note = 2'-O-methylcytidine-3'-phosphate
  modified_base 7: mod_base = OTHER; note = 2'-O-methyladenosine-3'-phosphate
  modified_base 8: mod_base = OTHER; note = adenosine-3'-phosphate
  modified_base 9: mod_base = OTHER; note = adenosine-3'-phosphate
  modified_base 10: mod_base = OTHER; note = 2'-O-methyladenosine-3'-phosphate
  modified_base 11: mod_base = OTHER; note = 2'-O-methylguanosine-3'-phosphate
  modified_base 12: mod_base = OTHER; note = adenosine-3'-phosphate
  modified_base 13: mod_base = OTHER; note = uridine-3'-phosphate
  modified_base 14: mod_base = OTHER; note = adenosine-3'-phosphate
  modified_base 15: mod_base = OTHER; note = adenosine-3'-phosphate
  modified_base 16: mod_base = OTHER; note = adenosine-3'-phosphate
  modified_base 17: mod_base = OTHER; note = 2'-O-methyluridine-3'-phosphate
  modified_base 18: mod_base = OTHER; note = 2'-O-methylguanosine-3'-phosphate
  modified_base 19: mod_base = OTHER; note = 2'-O-methyluridine-3'-phosphate
  modified_base 20: mod_base = OTHER; note = 2'-deoxythymidine-3'-phosphorothioate
  misc_feature 1..19: note = RNA
  misc_feature 20..21: note = DNA
agacccaaaagataaatgttt

SEQ ID NO: 1191 - DNA, 21 bp, synthetic construct
  source 1..21: mol_type = other DNA
  modified_base 1: mod_base = OTHER; note = adenosine-3'-phosphate
  modified_base 2: mod_base = OTHER; note = 2'-deoxy-2'-fluorocytidine-3'-phosphate
  modified_base 3: mod_base = OTHER; note = adenosine-3'-phosphate
  modified_base 4: mod_base = OTHER; note = 2'-deoxy-2'-fluorouridine-3'-phosphate
  modified_base 5: mod_base = OTHER; note = 2'-deoxy-2'-fluorouridine-3'-phosphate
  modified_base 6: mod_base = OTHER; note = 2'-deoxy-2'-fluorouridine-3'-phosphate
  modified_base 7: mod_base = OTHER; note = adenosine-3'-phosphate
  modified_base 8: mod_base = OTHER; note = 2'-deoxy-2'-fluorouridine-3'-phosphate
  modified_base 9: mod_base = OTHER; note = 2'-deoxy-2'-fluorocytidine-3'-phosphate
  modified_base 10: mod_base = OTHER; note = 2'-deoxy-2'-fluorouridine-3'-phosphate
  modified_base 11: mod_base = OTHER; note = 2'-deoxy-2'-fluorouridine-3'-phosphate
  modified_base 12: mod_base = OTHER; note = 2'-deoxy-2'-fluorouridine-3'-phosphate
  modified_base 13: mod_base = OTHER; note = 2'-deoxy-2'-fluorouridine-3'-phosphate
  modified_base 14: mod_base = OTHER; note = guanosine-3'-phosphate
  modified_base 15: mod_base = OTHER; note = guanosine-3'-phosphate
  modified_base 16: mod_base = OTHER; note = guanosine-3'-phosphate
  modified_base 17: mod_base = OTHER; note = 2'-deoxy-2'-fluorouridine-3'-phosphate
  modified_base 18: mod_base = OTHER; note = 2'-deoxy-2'-fluorocytidine-3'-phosphate
  modified_base 19: mod_base = OTHER; note = 2'-deoxy-2'-fluorouridine-3'-phosphate
  modified_base 20: mod_base = OTHER; note = 2'-deoxythymidine-3'-phosphorothioate
  misc_feature 1..19: note = RNA
  misc_feature 20..21: note = DNA
acatttatcttttgggtcttt

SEQ ID NO: 1192 - DNA, 21 bp, synthetic construct
  source 1..21: mol_type = other DNA
  modified_base 1: mod_base = OTHER; note = adenosine-3'-phosphate
  modified_base 2: mod_base = OTHER; note = guanosine-3'-phosphate
  modified_base 3: mod_base = OTHER; note = adenosine-3'-phosphate
  modified_base 4: mod_base = OTHER; note = cytidine-3'-phosphate
  modified_base 5: mod_base = OTHER; note = cytidine-3'-phosphate
  modified_base 6: mod_base = OTHER; note = 2'-O-methylcytidine-3'-phosphate
  modified_base 7: mod_base = OTHER; note = 2'-O-methyladenosine-3'-phosphate
  modified_base 8: mod_base = OTHER; note = adenosine-3'-phosphate
  modified_base 9: mod_base = OTHER; note = adenosine-3'-phosphate
  modified_base 10: mod_base = OTHER; note = 2'-O-methyladenosine-3'-phosphate
  modified_base 11: mod_base = OTHER; note = 2'-O-methylguanosine-3'-phosphate
  modified_base 12: mod_base = OTHER; note = adenosine-3'-phosphate
  modified_base 13: mod_base = OTHER; note = uridine-3'-phosphate
  modified_base 14: mod_base = OTHER; note = adenosine-3'-phosphate
  modified_base 15: mod_base = OTHER; note = adenosine-3'-phosphate
  modified_base 16: mod_base = OTHER; note = adenosine-3'-phosphate
  modified_base 17: mod_base = OTHER; note = 2'-O-methyluridine-3'-phosphate
  modified_base 18: mod_base = OTHER; note = 2'-O-methylguanosine-3'-phosphate
  modified_base 19: mod_base = OTHER; note = 2'-O-methyluridine-3'-phosphate
  modified_base 20: mod_base = OTHER; note = 2'-deoxythymidine-3'-phosphorothioate
  misc_feature 1..19: note = RNA
  misc_feature 20..21: note = DNA
agacccaaaagataaatgttt

SEQ ID NO: 1193 - DNA, 21 bp, synthetic construct
  source 1..21: mol_type = other DNA
  modified_base 1: mod_base = OTHER; note = adenosine-3'-phosphate
  modified_base 2: mod_base = OTHER; note = 2'-O-methylcytidine-3'-phosphate
  modified_base 3: mod_base = OTHER; note = adenosine-3'-phosphate
  modified_base 4: mod_base = OTHER; note = 2'-O-methyluridine-3'-phosphate
  modified_base 5: mod_base = OTHER; note = uridine-3'-phosphate
  modified_base 6: mod_base = OTHER; note = 2'-O-methyluridine-3'-phosphate
  modified_base 7: mod_base = OTHER; note = adenosine-3'-phosphate
  modified_base 8: mod_base = OTHER; note = 2'-O-methyluridine-3'-phosphate
  modified_base 9: mod_base = OTHER; note = cytidine-3'-phosphate
  modified_base 10: mod_base = OTHER; note = 2'-O-methyluridine-3'-phosphate
  modified_base 11: mod_base = OTHER; note = uridine-3'-phosphate
  modified_base 12: mod_base = OTHER; note = 2'-O-methyluridine-3'-phosphate
  modified_base 13: mod_base = OTHER; note = uridine-3'-phosphate
  modified_base 14: mod_base = OTHER; note = 2'-O-methylguanosine-3'-phosphate
  modified_base 15: mod_base = OTHER; note = guanosine-3'-phosphate
  modified_base 16: mod_base = OTHER; note = 2'-O-methylguanosine-3'-phosphate
  modified_base 17: mod_base = OTHER; note = uridine-3'-phosphate
  modified_base 18: mod_base = OTHER; note = 2'-O-methylcytidine-3'-phosphate
  modified_base 19: mod_base = OTHER; note = uridine-3'-phosphate
  modified_base 20: mod_base = OTHER; note = 2'-deoxythymidine-3'-phosphorothioate
  misc_feature 1..19: note = RNA
  misc_feature 20..21: note = DNA
acatttatcttttgggtcttt

SEQ ID NO: 1194 - DNA, 21 bp, synthetic construct
  source 1..21: mol_type = other DNA
  modified_base 1: mod_base = OTHER; note = adenosine-3'-phosphate
  modified_base 2: mod_base = OTHER; note = guanosine-3'-phosphate
  modified_base 3: mod_base = OTHER; note = adenosine-3'-phosphate
  modified_base 4: mod_base = OTHER; note = cytidine-3'-phosphate
  modified_base 5: mod_base = OTHER; note = cytidine-3'-phosphate
  modified_base 6: mod_base = OTHER; note = 2'-O-methylcytidine-3'-phosphate
  modified_base 7: mod_base = OTHER; note = 2'-O-methyladenosine-3'-phosphate
  modified_base 8: mod_base = OTHER; note = adenosine-3'-phosphate
  modified_base 9: mod_base = OTHER; note = adenosine-3'-phosphate
  modified_base 10: mod_base = OTHER; note = 2'-O-methyladenosine-3'-phosphate
  modified_base 11: mod_base = OTHER; note = 2'-O-methylguanosine-3'-phosphate
  modified_base 12: mod_base = OTHER; note = adenosine-3'-phosphate
  modified_base 13: mod_base = OTHER; note = uridine-3'-phosphate
  modified_base 14: mod_base = OTHER; note = adenosine-3'-phosphate
  modified_base 15: mod_base = OTHER; note = adenosine-3'-phosphate
  modified_base 16: mod_base = OTHER; note = adenosine-3'-phosphate
  modified_base 17: mod_base = OTHER; note = 2'-O-methyluridine-3'-phosphate
  modified_base 18: mod_base = OTHER; note = 2'-O-methylguanosine-3'-phosphate
  modified_base 19: mod_base = OTHER; note = 2'-O-methyluridine-3'-phosphate
  modified_base 20: mod_base = OTHER; note = 2'-deoxythymidine-3'-phosphorothioate
  misc_feature 1..19: note = RNA
  misc_feature 20..21: note = DNA
agacccaaaagataaatgttt

SEQ ID NO: 1195 - DNA, 21 bp, synthetic construct
  source 1..21: mol_type = other DNA
  modified_base 1: mod_base = OTHER; note = 2'-deoxy-2'-fluoroguanosine-3'-phosphate
  modified_base 2: mod_base = OTHER; note = 2'-O-methylcytidine-3'-phosphate
  modified_base 3: mod_base = OTHER; note = 2'-deoxy-2'-fluorocytidine-3'-phosphate
  modified_base 4: mod_base = OTHER; note = 2'-O-methyladenosine-3'-phosphate
  modified_base 5: mod_base = OTHER; note = 2'-deoxy-2'-fluorouridine-3'-phosphate
  modified_base 6: mod_base = OTHER; note = 2'-O-methylcytidine-3'-phosphate
  modified_base 7: mod_base = OTHER; note = 2'-deoxy-2'-fluorouridine-3'-phosphate
  modified_base 8: mod_base = OTHER; note = 2'-O-methylguanosine-3'-phosphate
  modified_base 9: mod_base = OTHER; note = 2'-deoxy-2'-fluorocytidine-3'-phosphate
  modified_base 10: mod_base = OTHER; note = 2'-O-methyluridine-3'-phosphate
  modified_base 11: mod_base = OTHER; note = 2'-deoxy-2'-fluoroguanosine-3'-phosphate
  modified_base 12: mod_base = OTHER; note = 2'-O-methylcytidine-3'-phosphate
  modified_base 13: mod_base = OTHER; note = 2'-deoxy-2'-fluorocytidine-3'-phosphate
  modified_base 14: mod_base = OTHER; note = 2'-O-methylguanosine-3'-phosphate
  modified_base 15: mod_base = OTHER; note = 2'-deoxy-2'-fluoroguanosine-3'-phosphate
  modified_base 16: mod_base = OTHER; note = 2'-O-methyladenosine-3'-phosphate
  modified_base 17: mod_base = OTHER; note = 2'-deoxy-2'-fluoroguanosine-3'-phosphate
  modified_base 18: mod_base = OTHER; note = 2'-O-methylcytidine-3'-phosphate
  modified_base 19: mod_base = OTHER; note = 2'-deoxy-2'-fluorocytidine-3'-phosphate
  modified_base 20: mod_base = OTHER; note = 2'-deoxythymidine-3'-phosphorothioate
  misc_feature 1..19: note = RNA
  misc_feature 20..21: note = DNA
gccatctgctgccggagcctt

SEQ ID NO: 1196 - DNA, 21 bp, synthetic construct
  source 1..21: mol_type = other DNA
  modified_base 1: mod_base = OTHER; note = 2'-O-methylguanosine-3'-phosphate 5'phosphate
  modified_base 2: mod_base = OTHER; note = 2'-deoxy-2'-fluoroguanosine-3'-phosphate
  modified_base 3: mod_base = OTHER; note = 2'-O-methylcytidine-3'-phosphate
  modified_base 4: mod_base = OTHER; note = 2'-deoxy-2'-fluorouridine-3'-phosphate
  modified_base 5: mod_base = OTHER; note = 2'-O-methylcytidine-3'-phosphate
  modified_base 6: mod_base = OTHER; note = 2'-deoxy-2'-fluorocytidine-3'-phosphate
  modified_base 7: mod_base = OTHER; note = 2'-O-methylguanosine-3'-phosphate
  modified_base 8: mod_base = OTHER; note = 2'-deoxy-2'-fluoroguanosine-3'-phosphate
  modified_base 9: mod_base = OTHER; note = 2'-O-methylcytidine-3'-phosphate
  modified_base 10: mod_base = OTHER; note = 2'-deoxy-2'-fluoroadenosine-3'-phosphate
  modified_base 11: mod_base = OTHER; note = 2'-O-methylguanosine-3'-phosphate
  modified_base 12: mod_base = OTHER; note = 2'-deoxy-2'-fluorocytidine-3'-phosphate
  modified_base 13: mod_base = OTHER; note = 2'-O-methyladenosine-3'-phosphate
  modified_base 14: mod_base = OTHER; note = 2'-deoxy-2'-fluoroguanosine-3'-phosphate
  modified_base 15: mod_base = OTHER; note = 2'-O-methyladenosine-3'-phosphate
  modified_base 16: mod_base = OTHER; note = 2'-deoxy-2'-fluorouridine-3'-phosphate
  modified_base 17: mod_base = OTHER; note = 2'-O-methylguanosine-3'-phosphate
  modified_base 18: mod_base = OTHER; note = 2'-deoxy-2'-fluoroguanosine-3'-phosphate
  modified_base 19: mod_base = OTHER; note = 2'-O-methylcytidine-3'-phosphate
  modified_base 20: mod_base = OTHER; note = 2'-deoxythymidine-3'-phosphorothioate
  misc_feature 1..19: note = RNA
  misc_feature 20..21: note = DNA
ggctccggcagcagatggctt

SEQ ID NO: 1197 - DNA, 21 bp, synthetic construct
  source 1..21: mol_type = other DNA
  modified_base 1: mod_base = OTHER; note = guanosine-3'-phosphate
  modified_base 2: mod_base = OTHER; note = 2'-deoxy-2'-fluorocytidine-3'-phosphate
  modified_base 3: mod_base = OTHER; note = 2'-deoxy-2'-fluorocytidine-3'-phosphate
  modified_base 4: mod_base = OTHER; note = adenosine-3'-phosphate
  modified_base 5: mod_base = OTHER; note = 2'-deoxy-2'-fluorouridine-3'-phosphate
  modified_base 6: mod_base = OTHER; note = 2'-deoxy-2'-fluorocytidine-3'-phosphate
  modified_base 7: mod_base = OTHER; note = 2'-deoxy-2'-fluorouridine-3'-phosphate
  modified_base 8: mod_base = OTHER; note = guanosine-3'-phosphate
  modified_base 9: mod_base = OTHER; note = 2'-deoxy-2'-fluorocytidine-3'-phosphate
  modified_base 10: mod_base = OTHER; note = 2'-deoxy-2'-fluorouridine-3'-phosphate
  modified_base 11: mod_base = OTHER; note = guanosine-3'-phosphate
  modified_base 12: mod_base = OTHER; note = 2'-deoxy-2'-fluorocytidine-3'-phosphate
  modified_base 13: mod_base = OTHER; note = 2'-deoxy-2'-fluorocytidine-3'-phosphate
  modified_base 14: mod_base = OTHER; note = guanosine-3'-phosphate
  modified_base 15: mod_base = OTHER; note = guanosine-3'-phosphate
  modified_base 16: mod_base = OTHER; note = adenosine-3'-phosphate
  modified_base 17: mod_base = OTHER; note = guanosine-3'-phosphate
  modified_base 18: mod_base = OTHER; note = 2'-deoxy-2'-fluorocytidine-3'-phosphate
  modified_base 19: mod_base = OTHER; note = 2'-deoxy-2'-fluorocytidine-3'-phosphate
  modified_base 20: mod_base = OTHER; note = 2'-deoxythymidine-3'-phosphorothioate
  misc_feature 1..19: note = RNA
  misc_feature 20..21: note = DNA
gccatctgctgccggagcctt

SEQ ID NO: 1198 - DNA, 21 bp, synthetic construct
  source 1..21: mol_type = other DNA
  modified_base 1: mod_base = OTHER; note = guanosine-3'-phosphate
  modified_base 2: mod_base = OTHER; note = guanosine-3'-phosphate
  modified_base 3: mod_base = OTHER; note = 2'-deoxy-2'-fluorocytidine-3'-phosphate
  modified_base 4: mod_base = OTHER; note = 2'-deoxy-2'-fluorouridine-3'-phosphate
  modified_base 5: mod_base = OTHER; note = 2'-deoxy-2'-fluorocytidine-3'-phosphate
  modified_base 6: mod_base = OTHER; note = 2'-deoxy-2'-fluorocytidine-3'-phosphate
  modified_base 7: mod_base = OTHER; note = guanosine-3'-phosphate
  modified_base 8: mod_base = OTHER; note = guanosine-3'-phosphate
  modified_base 9: mod_base = OTHER; note = 2'-deoxy-2'-fluorocytidine-3'-phosphate
  modified_base 10: mod_base = OTHER; note = adenosine-3'-phosphate
  modified_base 11: mod_base = OTHER; note = guanosine-3'-phosphate
  modified_base 12: mod_base = OTHER; note = 2'-deoxy-2'-fluorocytidine-3'-phosphate
  modified_base 13: mod_base = OTHER; note = adenosine-3'-phosphate
  modified_base 14: mod_base = OTHER; note = guanosine-3'-phosphate
  modified_base 15: mod_base = OTHER; note = adenosine-3'-phosphate
  modified_base 16: mod_base = OTHER; note = 2'-deoxy-2'-fluorouridine-3'-phosphate
  modified_base 17: mod_base = OTHER; note = guanosine-3'-phosphate
  modified_base 18: mod_base = OTHER; note = guanosine-3'-phosphate
  modified_base 19: mod_base = OTHER; note = 2'-deoxy-2'-fluorocytidine-3'-phosphate
  modified_base 20: mod_base = OTHER; note = 2'-deoxythymidine-3'-phosphorothioate
  misc_feature 1..19: note = RNA
  misc_feature 20..21: note = DNA
ggctccggcagcagatggctt

SEQ ID NO: 1199 - DNA, 21 bp, synthetic construct
  source 1..21: mol_type = other DNA
  modified_base 1: mod_base = OTHER; note = guanosine-3'-phosphate
  modified_base 2: mod_base = OTHER; note = 2'-O-methylcytidine-3'-phosphate
  modified_base 3: mod_base = OTHER; note = cytidine-3'-phosphate
  modified_base 4: mod_base = OTHER; note = 2'-O-methyladenosine-3'-phosphate
  modified_base 5: mod_base = OTHER; note = uridine-3'-phosphate
  modified_base 6: mod_base = OTHER; note = 2'-O-methylcytidine-3'-phosphate
  modified_base 7: mod_base = OTHER; note = uridine-3'-phosphate
  modified_base 8: mod_base = OTHER; note = 2'-O-methylguanosine-3'-phosphate
  modified_base 9: mod_base = OTHER; note = cytidine-3'-phosphate
  modified_base 10: mod_base = OTHER; note = 2'-O-methyluridine-3'-phosphate
  modified_base 11: mod_base = OTHER; note = guanosine-3'-phosphate
  modified_base 12: mod_base = OTHER; note = 2'-O-methylcytidine-3'-phosphate
  modified_base 13: mod_base = OTHER; note = cytidine-3'-phosphate
  modified_base 14: mod_base = OTHER; note = 2'-O-methylguanosine-3'-phosphate
  modified_base 15: mod_base = OTHER; note = guanosine-3'-phosphate
  modified_base 16: mod_base = OTHER; note = 2'-O-methyladenosine-3'-phosphate
  modified_base 17: mod_base = OTHER; note = guanosine-3'-phosphate
  modified_base 18: mod_base = OTHER; note = 2'-O-methylcytidine-3'-phosphate
  modified_base 19: mod_base = OTHER; note = cytidine-3'-phosphate
  modified_base 20: mod_base = OTHER; note = 2'-deoxythymidine-3'-phosphorothioate
  misc_feature 1..19: note = RNA
  misc_feature 20..21: note = DNA
gccatctgctgccggagcctt

SEQ ID NO: 1200 - DNA, 21 bp, synthetic construct
  source 1..21: mol_type = other DNA
  modified_base 1: mod_base = OTHER; note = 2'-O-methylguanosine-3'-phosphate 5'phosphate
  modified_base 2: mod_base = OTHER; note = 2'-deoxy-2'-fluoroguanosine-3'-phosphate
  modified_base 3: mod_base = OTHER; note = 2'-O-methylcytidine-3'-phosphate
  modified_base 4: mod_base = OTHER; note = 2'-deoxy-2'-fluorouridine-3'-phosphate
  modified_base 5: mod_base = OTHER; note = 2'-O-methylcytidine-3'-phosphate
  modified_base 6: mod_base = OTHER; note = 2'-deoxy-2'-fluorocytidine-3'-phosphate
  modified_base 7: mod_base = OTHER; note = 2'-O-methylguanosine-3'-phosphate
  modified_base 8: mod_base = OTHER; note = 2'-deoxy-2'-fluoroguanosine-3'-phosphate
  modified_base 9: mod_base = OTHER; note = 2'-O-methylcytidine-3'-phosphate
  modified_base 10: mod_base = OTHER; note = 2'-deoxy-2'-fluoroadenosine-3'-phosphate
  modified_base 11: mod_base = OTHER; note = 2'-O-methylguanosine-3'-phosphate
  modified_base 12: mod_base = OTHER; note = 2'-deoxy-2'-fluorocytidine-3'-phosphate
  modified_base 13: mod_base = OTHER; note = 2'-O-methyladenosine-3'-phosphate
  modified_base 14: mod_base = OTHER; note = 2'-deoxy-2'-fluoroguanosine-3'-phosphate
  modified_base 15: mod_base = OTHER; note = 2'-O-methyladenosine-3'-phosphate
  modified_base 16: mod_base = OTHER; note = 2'-deoxy-2'-fluorouridine-3'-phosphate
  modified_base 17: mod_base = OTHER; note = 2'-O-methylguanosine-3'-phosphate
  modified_base 18: mod_base = OTHER; note = 2'-deoxy-2'-fluoroguanosine-3'-phosphate
  modified_base 19: mod_base = OTHER; note = 2'-O-methylcytidine-3'-phosphate
  modified_base 20: mod_base = OTHER; note = 2'-deoxythymidine-3'-phosphorothioate
  misc_feature 1..19: note = RNA
  misc_feature 20..21: note = DNA
ggctccggcagcagatggctt

SEQ ID NO: 1201 - DNA, 21 bp, synthetic construct
  source 1..21: mol_type = other DNA
  modified_base 1: mod_base = OTHER; note = guanosine-3'-phosphate
  modified_base 2: mod_base = OTHER; note = 2'-O-methylcytidine-3'-phosphate
  modified_base 3: mod_base = OTHER; note = cytidine-3'-phosphate
  modified_base 4: mod_base = OTHER; note = 2'-O-methyladenosine-3'-phosphate
  modified_base 5: mod_base = OTHER; note = uridine-3'-phosphate
  modified_base 6: mod_base = OTHER; note = 2'-O-methylcytidine-3'-phosphate
  modified_base 7: mod_base = OTHER; note = uridine-3'-phosphate
  modified_base 8: mod_base = OTHER; note = 2'-O-methylguanosine-3'-phosphate
  modified_base 9: mod_base = OTHER; note = cytidine-3'-phosphate
  modified_base 10: mod_base = OTHER; note = 2'-O-methyluridine-3'-phosphate
  modified_base 11: mod_base = OTHER; note = guanosine-3'-phosphate
  modified_base 12: mod_base = OTHER; note = 2'-O-methylcytidine-3'-phosphate
  modified_base 13: mod_base = OTHER; note = cytidine-3'-phosphate
  modified_base 14: mod_base = OTHER; note = 2'-O-methylguanosine-3'-phosphate
  modified_base 15: mod_base = OTHER; note = guanosine-3'-phosphate
  modified_base 16: mod_base = OTHER; note = 2'-O-methyladenosine-3'-phosphate
  modified_base 17: mod_base = OTHER; note = guanosine-3'-phosphate
  modified_base 18: mod_base = OTHER; note = 2'-O-methylcytidine-3'-phosphate
  modified_base 19: mod_base = OTHER; note = cytidine-3'-phosphate
  modified_base 20: mod_base = OTHER; note = 2'-deoxythymidine-3'-phosphorothioate
  misc_feature 1..19: note = RNA
  misc_feature 20..21: note = DNA
gccatctgctgccggagcctt

SEQ ID NO: 1202 - DNA, 21 bp, synthetic construct
  source 1..21: mol_type = other DNA
  modified_base 1: mod_base = OTHER; note = guanosine-3'-phosphate
  modified_base 2: mod_base = OTHER; note = guanosine-3'-phosphate
  modified_base 3: mod_base = OTHER; note = 2'-deoxy-2'-fluorocytidine-3'-phosphate
  modified_base 4: mod_base = OTHER; note = 2'-deoxy-2'-fluorouridine-3'-phosphate
  modified_base 5: mod_base = OTHER; note = 2'-deoxy-2'-fluorocytidine-3'-phosphate
  modified_base 6: mod_base = OTHER; note = 2'-deoxy-2'-fluorocytidine-3'-phosphate
  modified_base 7: mod_base = OTHER; note = guanosine-3'-phosphate
  modified_base 8: mod_base = OTHER; note = guanosine-3'-phosphate
  modified_base 9: mod_base = OTHER; note = 2'-deoxy-2'-fluorocytidine-3'-phosphate
  modified_base 10: mod_base = OTHER; note = adenosine-3'-phosphate
  modified_base 11: mod_base = OTHER; note = guanosine-3'-phosphate
  modified_base 12: mod_base = OTHER; note = 2'-deoxy-2'-fluorocytidine-3'-phosphate
  modified_base 13: mod_base = OTHER; note = adenosine-3'-phosphate
  modified_base 14: mod_base = OTHER; note = guanosine-3'-phosphate
  modified_base 15: mod_base = OTHER; note = adenosine-3'-phosphate
  modified_base 16: mod_base = OTHER; note = 2'-deoxy-2'-fluorouridine-3'-phosphate
  modified_base 17: mod_base = OTHER; note = guanosine-3'-phosphate
  modified_base 18: mod_base = OTHER; note = guanosine-3'-phosphate
  modified_base 19: mod_base = OTHER; note = 2'-deoxy-2'-fluorocytidine-3'-phosphate
  modified_base 20: mod_base = OTHER; note = 2'-deoxythymidine-3'-phosphorothioate
  misc_feature 1..19: note = RNA
  misc_feature 20..21: note = DNA
ggctccggcagcagatggctt

SEQ ID NO: 1203 - DNA, 21 bp, synthetic construct
  source 1..21: mol_type = other DNA
  modified_base 1: mod_base = OTHER; note = 2'-deoxy-2'-fluoroguanosine-3'-phosphate
  modified_base 2: mod_base = OTHER; note = 2'-O-methylcytidine-3'-phosphate
  modified_base 3: mod_base = OTHER; note = 2'-deoxy-2'-fluorocytidine-3'-phosphate
  modified_base 4: mod_base = OTHER; note = 2'-O-methyladenosine-3'-phosphate
  modified_base 5: mod_base = OTHER; note = 2'-deoxy-2'-fluorouridine-3'-phosphate
  modified_base 6: mod_base = OTHER; note = 2'-O-methylcytidine-3'-phosphate
  modified_base 7: mod_base = OTHER; note = 2'-deoxy-2'-fluorouridine-3'-phosphate
  modified_base 8: mod_base = OTHER; note = 2'-O-methylguanosine-3'-phosphate
  modified_base 9: mod_base = OTHER; note = 2'-deoxy-2'-fluorocytidine-3'-phosphate
  modified_base 10: mod_base = OTHER; note = 2'-O-methyluridine-3'-phosphate
  modified_base 11: mod_base = OTHER; note = 2'-deoxy-2'-fluoroguanosine-3'-phosphate
  modified_base 12: mod_base = OTHER; note = 2'-O-methylcytidine-3'-phosphate
  modified_base 13: mod_base = OTHER; note = 2'-deoxy-2'-fluorocytidine-3'-phosphate
  modified_base 14: mod_base = OTHER; note = 2'-O-methylguanosine-3'-phosphate
  modified_base 15: mod_base = OTHER; note = 2'-deoxy-2'-fluoroguanosine-3'-phosphate
  modified_base 16: mod_base = OTHER; note = 2'-O-methyladenosine-3'-phosphate
  modified_base 17: mod_base = OTHER; note = 2'-deoxy-2'-fluoroguanosine-3'-phosphate
  modified_base 18: mod_base = OTHER; note = 2'-O-methylcytidine-3'-phosphate
  modified_base 19: mod_base = OTHER; note = 2'-deoxy-2'-fluorocytidine-3'-phosphate
  modified_base 20: mod_base = OTHER; note = 2'-deoxythymidine-3'-phosphorothioate
  misc_feature 1..19: note = RNA
  misc_feature 20..21: note = DNA
gccatctgctgccggagcctt

SEQ ID NO: 1204 - DNA, 21 bp, synthetic construct
  source 1..21: mol_type = other DNA
  modified_base 1: mod_base = OTHER; note = guanosine-3'-phosphate
  modified_base 2: mod_base = OTHER; note = guanosine-3'-phosphate
  modified_base 3: mod_base = OTHER; note = cytidine-3'-phosphate
  modified_base 4: mod_base = OTHER; note = uridine-3'-phosphate
  modified_base 5: mod_base = OTHER; note = cytidine-3'-phosphate
  modified_base 6: mod_base = OTHER; note = 2'-O-methyladenosine-3'-phosphate
  modified_base 7: mod_base = OTHER; note = 2'-O-methyluridine-3'-phosphate
  modified_base 8: mod_base = OTHER; note = guanosine-3'-phosphate
  modified_base 9: mod_base = OTHER; note = cytidine-3'-phosphate
  modified_base 10: mod_base = OTHER; note = 2'-O-methyladenosine-3'-phosphate
  modified_base 11: mod_base = OTHER; note = 2'-O-methylguanosine-3'-phosphate
  modified_base 12: mod_base = OTHER; note = cytidine-3'-phosphate
  modified_base 13: mod_base = OTHER; note = adenosine-3'-phosphate
  modified_base 14: mod_base = OTHER; note = guanosine-3'-phosphate
  modified_base 15: mod_base = OTHER; note = adenosine-3'-phosphate
  modified_base 16: mod_base = OTHER; note = uridine-3'-phosphate
  modified_base 17: mod_base = OTHER; note = 2'-O-methylguanosine-3'-phosphate
  modified_base 18: mod_base = OTHER; note = 2'-O-methylguanosine-3'-phosphate
  modified_base 19: mod_base = OTHER; note = 2'-O-methylcytidine-3'-phosphate
  modified_base 20: mod_base = OTHER; note = 2'-deoxythymidine-3'-phosphorothioate
  misc_feature 1..19: note = RNA
  misc_feature 20..21: note = DNA
ggctcatgcagcagatggctt

SEQ ID NO: 1205 - DNA, 21 bp, synthetic construct
  source 1..21: mol_type = other DNA
  modified_base 1: mod_base = OTHER; note = guanosine-3'-phosphate
  modified_base 2: mod_base = OTHER; note = 2'-deoxy-2'-fluorocytidine-3'-phosphate
  modified_base 3: mod_base = OTHER; note = 2'-deoxy-2'-fluorocytidine-3'-phosphate
  modified_base 4: mod_base = OTHER; note = adenosine-3'-phosphate
  modified_base 5: mod_base = OTHER; note = 2'-deoxy-2'-fluorouridine-3'-phosphate
  modified_base 6: mod_base = OTHER; note = 2'-deoxy-2'-fluorocytidine-3'-phosphate
  modified_base 7: mod_base = OTHER; note = 2'-deoxy-2'-fluorouridine-3'-phosphate
  modified_base 8: mod_base = OTHER; note = guanosine-3'-phosphate
  modified_base 9: mod_base = OTHER; note = 2'-deoxy-2'-fluorocytidine-3'-phosphate
  modified_base 10: mod_base = OTHER; note = 2'-deoxy-2'-fluorouridine-3'-phosphate
  modified_base 11: mod_base = OTHER; note = guanosine-3'-phosphate
  modified_base 12: mod_base = OTHER; note = 2'-deoxy-2'-fluorocytidine-3'-phosphate
  modified_base 13: mod_base = OTHER; note = 2'-deoxy-2'-fluorocytidine-3'-phosphate
  modified_base 14: mod_base = OTHER; note = guanosine-3'-phosphate
  modified_base 15: mod_base = OTHER; note = guanosine-3'-phosphate
  modified_base 16: mod_base = OTHER; note = adenosine-3'-phosphate
  modified_base 17: mod_base = OTHER; note = guanosine-3'-phosphate
  modified_base 18: mod_base = OTHER; note = 2'-deoxy-2'-fluorocytidine-3'-phosphate
  modified_base 19: mod_base = OTHER; note = 2'-deoxy-2'-fluorocytidine-3'-phosphate
  modified_base 20: mod_base = OTHER; note = 2'-deoxythymidine-3'-phosphorothioate
  misc_feature 1..19: note = RNA
  misc_feature 20..21: note = DNA
gccatctgctgccggagcctt

SEQ ID NO: 1206 - DNA, 21 bp, synthetic construct
  source 1..21: mol_type = other DNA
  modified_base 1: mod_base = OTHER; note = guanosine-3'-phosphate
  modified_base 2: mod_base = OTHER; note = guanosine-3'-phosphate
  modified_base 3: mod_base = OTHER; note = cytidine-3'-phosphate
  modified_base 4: mod_base = OTHER; note = uridine-3'-phosphate
  modified_base 5: mod_base = OTHER; note = cytidine-3'-phosphate
  modified_base 6: mod_base = OTHER; note = 2'-O-methyladenosine-3'-phosphate
  modified_base 7: mod_base = OTHER; note = 2'-O-methyluridine-3'-phosphate
  modified_base 8: mod_base = OTHER; note = guanosine-3'-phosphate
  modified_base 9: mod_base = OTHER; note = cytidine-3'-phosphate
  modified_base 10: mod_base = OTHER; note = 2'-O-methyladenosine-3'-phosphate
  modified_base 11: mod_base = OTHER; note = 2'-O-methylguanosine-3'-phosphate
  modified_base 12: mod_base = OTHER; note = cytidine-3'-phosphate
  modified_base 13: mod_base = OTHER; note = adenosine-3'-phosphate
  modified_base 14: mod_base = OTHER; note = guanosine-3'-phosphate
  modified_base 15: mod_base = OTHER; note = adenosine-3'-phosphate
  modified_base 16: mod_base = OTHER; note = uridine-3'-phosphate
  modified_base 17: mod_base = OTHER; note = 2'-O-methylguanosine-3'-phosphate
  modified_base 18: mod_base = OTHER; note = 2'-O-methylguanosine-3'-phosphate
  modified_base 19: mod_base = OTHER; note = 2'-O-methylcytidine-3'-phosphate
  modified_base 20: mod_base = OTHER; note = 2'-deoxythymidine-3'-phosphorothioate
  misc_feature 1..19: note = RNA
  misc_feature 20..21: note = DNA
ggctcatgcagcagatggctt

SEQ ID NO: 1207 - DNA, 21 bp, synthetic construct
  source 1..21: mol_type = other DNA
  modified_base 1: mod_base = OTHER; note = guanosine-3'-phosphate
  modified_base 2: mod_base = OTHER; note = 2'-O-methylcytidine-3'-phosphate
  modified_base 3: mod_base = OTHER; note = cytidine-3'-phosphate
  modified_base 4: mod_base = OTHER; note = 2'-O-methyladenosine-3'-phosphate
  modified_base 5: mod_base = OTHER; note = uridine-3'-phosphate
  modified_base 6: mod_base = OTHER; note = 2'-O-methylcytidine-3'-phosphate
  modified_base 7: mod_base = OTHER; note = uridine-3'-phosphate
  modified_base 8: mod_base = OTHER; note = 2'-O-methylguanosine-3'-phosphate
  modified_base 9: mod_base = OTHER; note = cytidine-3'-phosphate
  modified_base 10: mod_base = OTHER; note = 2'-O-methyluridine-3'-phosphate
  modified_base 11: mod_base = OTHER; note = guanosine-3'-phosphate
  modified_base 12: mod_base = OTHER; note = 2'-O-methylcytidine-3'-phosphate
  modified_base 13: mod_base = OTHER; note = cytidine-3'-phosphate
  modified_base 14: mod_base = OTHER; note = 2'-O-methylguanosine-3'-phosphate
  modified_base 15: mod_base = OTHER; note = guanosine-3'-phosphate
  modified_base 16: mod_base = OTHER; note = 2'-O-methyladenosine-3'-phosphate
  modified_base 17: mod_base = OTHER; note = guanosine-3'-phosphate
  modified_base 18: mod_base = OTHER; note = 2'-O-methylcytidine-3'-phosphate
  modified_base 19: mod_base = OTHER; note = cytidine-3'-phosphate
  modified_base 20: mod_base = OTHER; note = 2'-deoxythymidine-3'-phosphorothioate
  misc_feature 1..19: note = RNA
  misc_feature 20..21: note = DNA
gccatctgctgccggagcctt

SEQ ID NO: 1208 - DNA, 21 bp, synthetic construct
  source 1..21: mol_type = other DNA
  modified_base 1: mod_base = OTHER; note = guanosine-3'-phosphate
  modified_base 2: mod_base = OTHER; note = guanosine-3'-phosphate
  modified_base 3: mod_base = OTHER; note = cytidine-3'-phosphate
  modified_base 4: mod_base = OTHER; note = uridine-3'-phosphate
  modified_base 5: mod_base = OTHER; note = cytidine-3'-phosphate
  modified_base 6: mod_base = OTHER; note = 2'-O-methyladenosine-3'-phosphate
  modified_base 7: mod_base = OTHER; note = 2'-O-methyluridine-3'-phosphate
  modified_base 8: mod_base = OTHER; note = guanosine-3'-phosphate
  modified_base 9: mod_base = OTHER; note = cytidine-3'-phosphate
  modified_base 10: mod_base = OTHER; note = 2'-O-methyladenosine-3'-phosphate
  modified_base 11: mod_base = OTHER; note = 2'-O-methylguanosine-3'-phosphate
  modified_base 12: mod_base = OTHER; note = cytidine-3'-phosphate
  modified_base 13: mod_base = OTHER; note = adenosine-3'-phosphate
  modified_base 14: mod_base = OTHER; note = guanosine-3'-phosphate
  modified_base 15: mod_base = OTHER; note = adenosine-3'-phosphate
  modified_base 16: mod_base = OTHER; note = uridine-3'-phosphate
  modified_base 17: mod_base = OTHER; note = 2'-O-methylguanosine-3'-phosphate
  modified_base 18: mod_base = OTHER; note = 2'-O-methylguanosine-3'-phosphate
  modified_base 19: mod_base = OTHER; note = 2'-O-methylcytidine-3'-phosphate
  modified_base 20: mod_base = OTHER; note = 2'-deoxythymidine-3'-phosphorothioate
  misc_feature 1..19: note = RNA
  misc_feature 20..21: note = DNA
ggctcatgcagcagatggctt

SEQ ID NO: 1209 - DNA, 21 bp, synthetic construct
  source 1..21: mol_type = other DNA
  modified_base 1: mod_base = OTHER; note = cytidine-3'-phosphate
  modified_base 2: mod_base = OTHER; note = adenosine-3'-phosphate
  modified_base 3: mod_base = OTHER; note = uridine-3'-phosphate
  modified_base 4: mod_base = OTHER; note = uridine-3'-phosphate
  modified_base 5: mod_base = OTHER; note = uridine-3'-phosphate
  modified_base 6: mod_base = OTHER; note = adenosine-3'-phosphate
  modified_base 7: mod_base = OTHER; note = uridine-3'-phosphate
  modified_base 8: mod_base = OTHER; note = cytidine-3'-phosphate
  modified_base 9: mod_base = OTHER; note = uridine-3'-phosphate
  modified_base 10: mod_base = OTHER; note = uridine-3'-phosphate
  modified_base 11: mod_base = OTHER; note = uridine-3'-phosphate
  modified_base 12: mod_base = OTHER; note = uridine-3'-phosphate
  modified_base 13: mod_base = OTHER; note = guanosine-3'-phosphate
  modified_base 14: mod_base = OTHER; note = guanosine-3'-phosphate
  modified_base 15: mod_base = OTHER; note = guanosine-3'-phosphate
  modified_base 16: mod_base = OTHER; note = uridine-3'-phosphate
  modified_base 17: mod_base = OTHER; note = cytidine-3'-phosphate
  modified_base 18: mod_base = OTHER; note = uridine-3'-phosphate
  modified_base 19: mod_base = OTHER; note = guanosine-3'-phosphate
  modified_base 20: mod_base = OTHER; note = 2'-deoxythymidine-3'-phosphorothioate
  misc_feature 1..19: note = RNA
  misc_feature 20..21: note = DNA
catttatcttttgggtctgtt

SEQ ID NO: 1210 - DNA, 21 bp, synthetic construct
  source 1..21: mol_type = other DNA
  modified_base 1: mod_base = OTHER; note = cytidine-3'-phosphate
  modified_base 2: mod_base = OTHER; note = adenosine-3'-phosphate
  modified_base 3: mod_base = OTHER; note = guanosine-3'-phosphate
  modified_base 4: mod_base = OTHER; note = adenosine-3'-phosphate
  modified_base 5: mod_base = OTHER; note = cytidine-3'-phosphate
  modified_base 6: mod_base = OTHER; note = cytidine-3'-phosphate
  modified_base 7: mod_base = OTHER; note = cytidine-3'-phosphate
  modified_base 8: mod_base = OTHER; note = adenosine-3'-phosphate
  modified_base 9: mod_base = OTHER; note = adenosine-3'-phosphate
  modified_base 10: mod_base = OTHER; note = adenosine-3'-phosphate
  modified_base 11: mod_base = OTHER; note = adenosine-3'-phosphate
  modified_base 12: mod_base = OTHER; note = guanosine-3'-phosphate
  modified_base 13: mod_base = OTHER; note = adenosine-3'-phosphate
  modified_base 14: mod_base = OTHER; note = uridine-3'-phosphate
  modified_base 15: mod_base = OTHER; note = adenosine-3'-phosphate
  modified_base 16: mod_base = OTHER; note = adenosine-3'-phosphate
  modified_base 17: mod_base = OTHER; note = adenosine-3'-phosphate
  modified_base 18: mod_base = OTHER; note = uridine-3'-phosphate
  modified_base 19: mod_base = OTHER; note = guanosine-3'-phosphate
  modified_base 20: mod_base = OTHER; note = 2'-deoxythymidine-3'-phosphorothioate
  misc_feature 1..19: note = RNA
  misc_feature 20..21: note = DNA
cagacccaaaagataaatgtt

SEQ ID NO: 1211 - DNA, 21 bp, synthetic construct
  source 1..21: mol_type = other DNA
  modified_base 1: mod_base = OTHER; note = 2'-O-methylcytidine-3'-phosphate
  modified_base 2: mod_base = OTHER; note = adenosine-3'-phosphate
  modified_base 3: mod_base = OTHER; note = 2'-O-methyluridine-3'-phosphate
  modified_base 4: mod_base = OTHER; note = 2'-O-methyluridine-3'-phosphate
  modified_base 5: mod_base = OTHER; note = 2'-O-methyluridine-3'-phosphate
  modified_base 6: mod_base = OTHER; note = adenosine-3'-phosphate
  modified_base 7: mod_base = OTHER; note = 2'-O-methyluridine-3'-phosphate
  modified_base 8: mod_base = OTHER; note = 2'-O-methylcytidine-3'-phosphate
  modified_base 9: mod_base = OTHER; note = 2'-O-methyluridine-3'-phosphate
  modified_base 10: mod_base = OTHER; note = 2'-O-methyluridine-3'-phosphate
  modified_base 11: mod_base = OTHER; note = 2'-O-methyluridine-3'-phosphate
  modified_base 12: mod_base = OTHER; note = 2'-O-methyluridine-3'-phosphate
  modified_base 13: mod_base = OTHER; note = guanosine-3'-phosphate
  modified_base 14: mod_base = OTHER; note = guanosine-3'-phosphate
  modified_base 15: mod_base = OTHER; note = guanosine-3'-phosphate
  modified_base 16: mod_base = OTHER; note = 2'-O-methyluridine-3'-phosphate
  modified_base 17: mod_base = OTHER; note = 2'-O-methylcytidine-3'-phosphate
  modified_base 18: mod_base = OTHER; note = 2'-O-methyluridine-3'-phosphate
  modified_base 19: mod_base = OTHER; note = guanosine-3'-phosphate
  modified_base 20: mod_base = OTHER; note = 2'-deoxythymidine-3'-phosphorothioate
  misc_feature 1..19: note = RNA
  misc_feature 20..21: note = DNA
catttatcttttgggtctgtt

SEQ ID NO: 1212 - DNA, 21 bp, synthetic construct
  source 1..21: mol_type = other DNA
  modified_base 1: mod_base = OTHER; note = 2'-O-methylcytidine-3'-phosphate
  modified_base 2: mod_base = OTHER; note = adenosine-3'-phosphate
  modified_base 3: mod_base = OTHER; note = guanosine-3'-phosphate
  modified_base 4: mod_base = OTHER; note = adenosine-3'-phosphate
  modified_base 5: mod_base = OTHER; note = cytidine-3'-phosphate
  modified_base 6: mod_base = OTHER; note = cytidine-3'-phosphate
  modified_base 7: mod_base = OTHER; note = 2'-O-methylcytidine-3'-phosphate
  modified_base 8: mod_base = OTHER; note = adenosine-3'-phosphate
  modified_base 9: mod_base = OTHER; note = adenosine-3'-phosphate
  modified_base 10: mod_base = OTHER; note = adenosine-3'-phosphate
  modified_base 11: mod_base = OTHER; note = adenosine-3'-phosphate
  modified_base 12: mod_base = OTHER; note = guanosine-3'-phosphate
  modified_base 13: mod_base = OTHER; note = adenosine-3'-phosphate
  modified_base 14: mod_base = OTHER; note = 2'-O-methyluridine-3'-phosphate
  modified_base 15: mod_base = OTHER; note = adenosine-3'-phosphate
  modified_base 16: mod_base = OTHER; note = adenosine-3'-phosphate
  modified_base 17: mod_base = OTHER; note = adenosine-3'-phosphate
  modified_base 18: mod_base = OTHER; note = uridine-3'-phosphate
  modified_base 19: mod_base = OTHER; note = guanosine-3'-phosphate
  modified_base 20: mod_base = OTHER; note = 2'-deoxythymidine-3'-phosphorothioate
  misc_feature 1..19: note = RNA
  misc_feature 20..21: note = DNA
cagacccaaaagataaatgtt

SEQ ID NO: 1213 - DNA, 21 bp, synthetic construct
  source 1..21: mol_type = other DNA
  modified_base 1: mod_base = OTHER; note = uridine-3'-phosphate
  modified_base 2: mod_base = OTHER; note = adenosine-3'-phosphate
  modified_base 3: mod_base = OTHER; note = uridine-3'-phosphate
  modified_base 4: mod_base = OTHER; note = cytidine-3'-phosphate
  modified_base 5: mod_base = OTHER; note = uridine-3'-phosphate
  modified_base 6: mod_base = OTHER; note = uridine-3'-phosphate
  modified_base 7: mod_base = OTHER; note = uridine-3'-phosphate
  modified_base 8: mod_base = OTHER; note = uridine-3'-phosphate
  modified_base 9: mod_base = OTHER; note = guanosine-3'-phosphate
  modified_base 10: mod_base = OTHER; note = guanosine-3'-phosphate
  modified_base 11: mod_base = OTHER; note = guanosine-3'-phosphate
  modified_base 12: mod_base = OTHER; note = uridine-3'-phosphate
  modified_base 13: mod_base = OTHER; note = cytidine-3'-phosphate
  modified_base 14: mod_base = OTHER; note = uridine-3'-phosphate
  modified_base 15: mod_base = OTHER; note = guanosine-3'-phosphate
  modified_base 16: mod_base = OTHER; note = uridine-3'-phosphate
  modified_base 17: mod_base = OTHER; note = cytidine-3'-phosphate
  modified_base 18: mod_base = OTHER; note = cytidine-3'-phosphate
  modified_base 19: mod_base = OTHER; note = uridine-3'-phosphate
  modified_base 20: mod_base = OTHER; note = 2'-deoxythymidine-3'-phosphorothioate
  misc_feature 1..19: note = RNA
  misc_feature 20..21: note = DNA
tatcttttgggtctgtccttt

SEQ ID NO: 1214 - DNA, 21 bp, synthetic construct
  source 1..21: mol_type = other DNA
  modified_base 1: mod_base = OTHER; note = adenosine-3'-phosphate
  modified_base 2: mod_base = OTHER; note = guanosine-3'-phosphate
  modified_base 3: mod_base = OTHER; note = guanosine-3'-phosphate
  modified_base 4: mod_base = OTHER; note = adenosine-3'-phosphate
  modified_base 5: mod_base = OTHER; note = cytidine-3'-phosphate
  modified_base 6: mod_base = OTHER; note = adenosine-3'-phosphate
  modified_base 7: mod_base = OTHER; note = guanosine-3'-phosphate
  modified_base 8: mod_base = OTHER; note = adenosine-3'-phosphate
  modified_base 9: mod_base = OTHER; note = cytidine-3'-phosphate
  modified_base 10: mod_base = OTHER; note = cytidine-3'-phosphate
  modified_base 11: mod_base = OTHER; note = cytidine-3'-phosphate
  modified_base 12: mod_base = OTHER; note = adenosine-3'-phosphate
  modified_base 13: mod_base = OTHER; note = adenosine-3'-phosphate
  modified_base 14: mod_base = OTHER; note = adenosine-3'-phosphate
  modified_base 15: mod_base = OTHER; note = adenosine-3'-phosphate
  modified_base 16: mod_base = OTHER; note = guanosine-3'-phosphate
  modified_base 17: mod_base = OTHER; note = adenosine-3'-phosphate
  modified_base 18: mod_base = OTHER; note = uridine-3'-phosphate
  modified_base 19: mod_base = OTHER; note = adenosine-3'-phosphate
  modified_base 20: mod_base = OTHER; note = 2'-deoxythymidine-3'-phosphorothioate
  misc_feature 1..19: note = RNA
  misc_feature 20..21: note = DNA
aggacagacccaaaagatatt

SEQ ID NO: 1215 - DNA, 21 bp, synthetic construct
  source 1..21: mol_type = other DNA
  modified_base 1: mod_base = OTHER; note = 2'-O-methyluridine-3'-phosphate
  modified_base 2: mod_base = OTHER; note = adenosine-3'-phosphate
  modified_base 3: mod_base = OTHER; note = 2'-O-methyluridine-3'-phosphate
  modified_base 4: mod_base = OTHER; note = 2'-O-methylcytidine-3'-phosphate
  modified_base 5: mod_base = OTHER; note = 2'-O-methyluridine-3'-phosphate
  modified_base 6: mod_base = OTHER; note = 2'-O-methyluridine-3'-phosphate
  modified_base 7: mod_base = OTHER; note = 2'-O-methyluridine-3'-phosphate
  modified_base 8: mod_base = OTHER; note = 2'-O-methyluridine-3'-phosphate
  modified_base 9: mod_base = OTHER; note = guanosine-3'-phosphate
  modified_base 10: mod_base = OTHER; note = guanosine-3'-phosphate
  modified_base 11: mod_base = OTHER; note = guanosine-3'-phosphate
  modified_base 12: mod_base = OTHER; note = 2'-O-methyluridine-3'-phosphate
  modified_base 13: mod_base = OTHER; note = 2'-O-methylcytidine-3'-phosphate
  modified_base 14: mod_base = OTHER; note = 2'-O-methyluridine-3'-phosphate
  modified_base 15: mod_base = OTHER; note = guanosine-3'-phosphate
  modified_base 16: mod_base = OTHER; note = 2'-O-methyluridine-3'-phosphate
  modified_base 17: mod_base = OTHER; note = 2'-O-methylcytidine-3'-phosphate
  modified_base 18: mod_base = OTHER; note = 2'-O-methylcytidine-3'-phosphate
  modified_base 19: mod_base = OTHER; note = 2'-O-methyluridine-3'-phosphate
  modified_base 20: mod_base = OTHER; note = 2'-deoxythymidine-3'-phosphorothioate
  misc_feature 1..19: note = RNA
  misc_feature 20..21: note = DNA
tatcttttgggtctgtccttt

SEQ ID NO: 1216 - DNA, 21 bp, synthetic construct
  source 1..21: mol_type = other DNA
  modified_base 1: mod_base = OTHER; note = adenosine-3'-phosphate
  modified_base 2: mod_base = OTHER; note = guanosine-3'-phosphate
  modified_base 3: mod_base = OTHER; note = guanosine-3'-phosphate
  modified_base 4: mod_base = OTHER; note = adenosine-3'-phosphate
  modified_base 5: mod_base = OTHER; note = 2'-O-methylcytidine-3'-phosphate
  modified_base 6: mod_base = OTHER; note = adenosine-3'-phosphate
  modified_base 7: mod_base = OTHER; note = guanosine-3'-phosphate
  modified_base 8: mod_base = OTHER; note = adenosine-3'-phosphate
  modified_base 9: mod_base = OTHER; note = cytidine-3'-phosphate
  modified_base 10: mod_base = OTHER; note = cytidine-3'-phosphate
  modified_base 11: mod_base = OTHER; note = 2'-O-methylcytidine-3'-phosphate
  modified_base 12: mod_base = OTHER; note = adenosine-3'-phosphate
  modified_base 13: mod_base = OTHER; note = adenosine-3'-phosphate
  modified_base 14: mod_base = OTHER; note = adenosine-3'-phosphate
  modified_base 15: mod_base = OTHER; note = adenosine-3'-phosphate
  modified_base 16: mod_base = OTHER; note = guanosine-3'-phosphate
  modified_base 17: mod_base = OTHER; note = adenosine-3'-phosphate
  modified_base 18: mod_base = OTHER; note = 2'-O-methyluridine-3'-phosphate
  modified_base 19: mod_base = OTHER; note = adenosine-3'-phosphate
  modified_base 20: mod_base = OTHER; note = 2'-deoxythymidine-3'-phosphorothioate
  misc_feature 1..19: note = RNA
  misc_feature 20..21: note = DNA
aggacagacccaaaagatatt

SEQ ID NO: 1217 - DNA, 21 bp, synthetic construct
  source 1..21: mol_type = other DNA
  modified_base 1: mod_base = OTHER; note = cytidine-3'-phosphate
  modified_base 2: mod_base = OTHER; note = uridine-3'-phosphate
  modified_base 3: mod_base = OTHER; note = cytidine-3'-phosphate
  modified_base 4: mod_base = OTHER; note = uridine-3'-phosphate
  modified_base 5: mod_base = OTHER; note = guanosine-3'-phosphate
  modified_base 6: mod_base = OTHER; note = uridine-3'-phosphate
  modified_base 7: mod_base = OTHER; note = uridine-3'-phosphate
  modified_base 8: mod_base = OTHER; note = guanosine-3'-phosphate
  modified_base 9: mod_base = OTHER; note = cytidine-3'-phosphate
  modified_base 10: mod_base = OTHER; note = cytidine-3'-phosphate
  modified_base 11: mod_base = OTHER; note = uridine-3'-phosphate
  modified_base 12: mod_base = OTHER; note = uridine-3'-phosphate
  modified_base 13: mod_base = OTHER; note = uridine-3'-phosphate
  modified_base 14: mod_base = OTHER; note = uridine-3'-phosphate
  modified_base 15: mod_base = OTHER; note = uridine-3'-phosphate
  modified_base 16: mod_base = OTHER; note = adenosine-3'-phosphate
  modified_base 17: mod_base = OTHER; note = cytidine-3'-phosphate
  modified_base 18: mod_base = OTHER; note = adenosine-3'-phosphate
  modified_base 19: mod_base = OTHER; note = guanosine-3'-phosphate
  modified_base 20: mod_base = OTHER; note = 2'-deoxythymidine-3'-phosphorothioate
  misc_feature 1..19: note = RNA
  misc_feature 20..21: note = DNA
ctctgttgcctttttacagtt

SEQ ID NO: 1218 - DNA, 21 bp, synthetic construct
  source 1..21: mol_type = other DNA
  modified_base 1: mod_base = OTHER; note = cytidine-3'-phosphate
  modified_base 2: mod_base = OTHER; note = uridine-3'-phosphate
  modified_base 3: mod_base = OTHER; note = guanosine-3'-phosphate
  modified_base 4: mod_base = OTHER; note = uridine-3'-phosphate
  modified_base 5: mod_base = OTHER; note = adenosine-3'-phosphate
  modified_base 6: mod_base = OTHER; note = adenosine-3'-phosphate
  modified_base 7: mod_base = OTHER; note = adenosine-3'-phosphate
  modified_base 8: mod_base = OTHER; note = adenosine-3'-phosphate
  modified_base 9: mod_base = OTHER; note = adenosine-3'-phosphate
  modified_base 10: mod_base = OTHER; note = guanosine-3'-phosphate
  modified_base 11: mod_base = OTHER; note = guanosine-3'-phosphate
  modified_base 12: mod_base = OTHER; note = cytidine-3'-phosphate
  modified_base 13: mod_base = OTHER; note = adenosine-3'-phosphate
  modified_base 14: mod_base = OTHER; note = adenosine-3'-phosphate
  modified_base 15: mod_base = OTHER; note = cytidine-3'-phosphate
  modified_base 16: mod_base = OTHER; note = adenosine-3'-phosphate
  modified_base 17: mod_base = OTHER; note = guanosine-3'-phosphate
  modified_base 18: mod_base = OTHER; note = adenosine-3'-phosphate
  modified_base 19: mod_base = OTHER; note = guanosine-3'-phosphate
  modified_base 20: mod_base = OTHER; note = 2'-deoxythymidine-3'-phosphorothioate
  misc_feature 1..19: note = RNA
  misc_feature 20..21: note = DNA
ctgtaaaaaggcaacagagtt

SEQ ID NO: 1219 - DNA, 21 bp, synthetic construct
  source 1..21: mol_type = other DNA
  modified_base 1: mod_base = OTHER; note = 2'-O-methylcytidine-3'-phosphate
  modified_base 2: mod_base = OTHER; note = 2'-O-methyluridine-3'-phosphate
  modified_base 3: mod_base = OTHER; note = 2'-O-methylcytidine-3'-phosphate
  modified_base 4: mod_base = OTHER; note = 2'-O-methyluridine-3'-phosphate
  modified_base 5: mod_base = OTHER; note = guanosine-3'-phosphate
  modified_base 6: mod_base = OTHER; note = 2'-O-methyluridine-3'-phosphate
  modified_base 7: mod_base = OTHER; note = 2'-O-methyluridine-3'-phosphate
  modified_base 8: mod_base = OTHER; note = guanosine-3'-phosphate
  modified_base 9: mod_base = OTHER; note = 2'-O-methylcytidine-3'-phosphate
  modified_base 10: mod_base = OTHER; note = 2'-O-methylcytidine-3'-phosphate
  modified_base 11: mod_base = OTHER; note = 2'-O-methyluridine-3'-phosphate
  modified_base 12: mod_base = OTHER; note = 2'-O-methyluridine-3'-phosphate
  modified_base 13: mod_base = OTHER; note = 2'-O-methyluridine-3'-phosphate
  modified_base 14: mod_base = OTHER; note = 2'-O-methyluridine-3'-phosphate
  modified_base 15: mod_base = OTHER; note = 2'-O-methyluridine-3'-phosphate
  modified_base 16: mod_base = OTHER; note = adenosine-3'-phosphate
  modified_base 17: mod_base = OTHER; note = 2'-O-methylcytidine-3'-phosphate
  modified_base 18: mod_base = OTHER; note = adenosine-3'-phosphate
  modified_base 19: mod_base = OTHER; note = guanosine-3'-phosphate
  modified_base 20: mod_base = OTHER; note = 2'-deoxythymidine-3'-phosphorothioate
  misc_feature 1..19: note = RNA
  misc_feature 20..21: note = DNA
ctctgttgcctttttacagtt

SEQ ID NO: 1220 - DNA, 21 bp, synthetic construct
  source 1..21: mol_type = other DNA
  modified_base 1: mod_base = OTHER; note = cytidine-3'-phosphate
  modified_base 2: mod_base = OTHER; note = uridine-3'-phosphate
  modified_base 3: mod_base = OTHER; note = guanosine-3'-phosphate
  modified_base 4: mod_base = OTHER; note = 2'-O-methyluridine-3'-phosphate
  modified_base 5: mod_base = OTHER; note = adenosine-3'-phosphate
  modified_base 6: mod_base = OTHER; note = adenosine-3'-phosphate
  modified_base 7: mod_base = OTHER; note = adenosine-3'-phosphate
  modified_base 8: mod_base = OTHER; note = adenosine-3'-phosphate
  modified_base 9: mod_base = OTHER; note = adenosine-3'-phosphate
  modified_base 10: mod_base = OTHER; note = guanosine-3'-phosphate
  modified_base 11: mod_base = OTHER; note = guanosine-3'-phosphate
  modified_base 12: mod_base = OTHER; note = 2'-O-methylcytidine-3'-phosphate
  modified_base 13: mod_base = OTHER; note = adenosine-3'-phosphate
  modified_base 14: mod_base = OTHER; note = adenosine-3'-phosphate
  modified_base 15: mod_base = OTHER; note = 2'-O-methylcytidine-3'-phosphate
  modified_base 16: mod_base = OTHER; note = adenosine-3'-phosphate
  modified_base 17: mod_base = OTHER; note = guanosine-3'-phosphate
  modified_base 18: mod_base = OTHER; note = adenosine-3'-phosphate
  modified_base 19: mod_base = OTHER; note = guanosine-3'-phosphate
  modified_base 20: mod_base = OTHER; note = 2'-deoxythymidine-3'-phosphorothioate
  misc_feature 1..19: note = RNA
  misc_feature 20..21: note = DNA
ctgtaaaaaggcaacagagtt

SEQ ID NO: 1221 - DNA, 21 bp, synthetic construct
  source 1..21: mol_type = other DNA
  modified_base 1: mod_base = OTHER; note = cytidine-3'-phosphate
  modified_base 2: mod_base = OTHER; note = cytidine-3'-phosphate
  modified_base 3: mod_base = OTHER; note = uridine-3'-phosphate
  modified_base 4: mod_base = OTHER; note = uridine-3'-phosphate
  modified_base 5: mod_base = OTHER; note = uridine-3'-phosphate
  modified_base 6: mod_base = OTHER; note = uridine-3'-phosphate
  modified_base 7: mod_base = OTHER; note = uridine-3'-phosphate
  modified_base 8: mod_base = OTHER; note = adenosine-3'-phosphate
  modified_base 9: mod_base = OTHER; note = cytidine-3'-phosphate
  modified_base 10: mod_base = OTHER; note = adenosine-3'-phosphate
  modified_base 11: mod_base = OTHER; note = guanosine-3'-phosphate
  modified_base 12: mod_base = OTHER; note = cytidine-3'-phosphate
  modified_base 13: mod_base = OTHER; note = cytidine-3'-phosphate
  modified_base 14: mod_base = OTHER; note = adenosine-3'-phosphate
  modified_base 15: mod_base = OTHER; note = adenosine-3'-phosphate
  modified_base 16: mod_base = OTHER; note = cytidine-3'-phosphate
  modified_base 17: mod_base = OTHER; note = uridine-3'-phosphate
  modified_base 18: mod_base = OTHER; note = uridine-3'-phosphate
  modified_base 19: mod_base = OTHER; note = uridine-3'-phosphate
  misc_feature 1..19: note = RNA
  misc_feature 20..21: note = DNA
cctttttacagccaacttttt

SEQ ID NO: 1222 - DNA, 21 bp, synthetic construct
  source 1..21: mol_type = other DNA
  modified_base 1: mod_base = OTHER; note = adenosine-3'-phosphate
  modified_base 2: mod_base = OTHER; note = adenosine-3'-phosphate
  modified_base 3: mod_base = OTHER; note = adenosine-3'-phosphate
  modified_base 4: mod_base = OTHER; note = guanosine-3'-phosphate
  modified_base 5: mod_base = OTHER; note = uridine-3'-phosphate
  modified_base 6: mod_base = OTHER; note = uridine-3'-phosphate
  modified_base 7: mod_base = OTHER; note = guanosine-3'-phosphate
  modified_base 8: mod_base = OTHER; note = guanosine-3'-phosphate
  modified_base 9: mod_base = OTHER; note = cytidine-3'-phosphate
  modified_base 10: mod_base = OTHER; note = uridine-3'-phosphate
  modified_base 11: mod_base = OTHER; note = guanosine-3'-phosphate
  modified_base 12: mod_base = OTHER; note = uridine-3'-phosphate
  modified_base 13: mod_base = OTHER; note = adenosine-3'-phosphate
  modified_base 14: mod_base = OTHER; note = adenosine-3'-phosphate
  modified_base 15: mod_base = OTHER; note = adenosine-3'-phosphate
  modified_base 16: mod_base = OTHER; note = adenosine-3'-phosphate
  modified_base 17: mod_base = OTHER; note = adenosine-3'-phosphate
  modified_base 18: mod_base = OTHER; note = guanosine-3'-phosphate
  modified_base 19: mod_base = OTHER; note = guanosine-3'-phosphate
  misc_feature 1..19: note = RNA
  misc_feature 20..21: note = DNA
aaagttggctgtaaaaaggtt

SEQ ID NO: 1223 - DNA, 21 bp, synthetic construct
  source 1..21: mol_type = other DNA
  modified_base 1: mod_base = OTHER; note = adenosine-3'-phosphate
  modified_base 2: mod_base = OTHER; note = guanosine-3'-phosphate
  modified_base 3: mod_base = OTHER; note = cytidine-3'-phosphate
  modified_base 4: mod_base = OTHER; note = cytidine-3'-phosphate
  modified_base 5: mod_base = OTHER; note = adenosine-3'-phosphate
  modified_base 6: mod_base = OTHER; note = adenosine-3'-phosphate
  modified_base 7: mod_base = OTHER; note = cytidine-3'-phosphate
  modified_base 8: mod_base = OTHER; note = uridine-3'-phosphate
  modified_base 9: mod_base = OTHER; note = uridine-3'-phosphate
  modified_base 10: mod_base = OTHER; note = uridine-3'-phosphate
  modified_base 11: mod_base = OTHER; note = uridine-3'-phosphate
  modified_base 12: mod_base = OTHER; note = cytidine-3'-phosphate
  modified_base 13: mod_base = OTHER; note = uridine-3'-phosphate
  modified_base 14: mod_base = OTHER; note = adenosine-3'-phosphate
  modified_base 15: mod_base = OTHER; note = guanosine-3'-phosphate
  modified_base 16: mod_base = OTHER; note = adenosine-3'-phosphate
  modified_base 17: mod_base = OTHER; note = cytidine-3'-phosphate
  modified_base 18: mod_base = OTHER; note = cytidine-3'-phosphate
  modified_base 19: mod_base = OTHER; note = uridine-3'-phosphate
  misc_feature 1..19: note = RNA
  misc_feature 20..21: note = DNA
agccaacttttctagaccttt

SEQ ID NO: 1224 - DNA, 21 bp, synthetic construct
  source 1..21: mol_type = other DNA
  modified_base 1: mod_base = OTHER; note = adenosine-3'-phosphate
  modified_base 2: mod_base = OTHER; note = guanosine-3'-phosphate
  modified_base 3: mod_base = OTHER; note = guanosine-3'-phosphate
  modified_base 4: mod_base = OTHER; note = uridine-3'-phosphate
  modified_base 5: mod_base = OTHER; note = cytidine-3'-phosphate
  modified_base 6: mod_base = OTHER; note = uridine-3'-phosphate
  modified_base 7: mod_base = OTHER; note = adenosine-3'-phosphate
  modified_base 8: mod_base = OTHER; note = guanosine-3'-phosphate
  modified_base 9: mod_base = OTHER; note = adenosine-3'-phosphate
  modified_base 10: mod_base = OTHER; note = adenosine-3'-phosphate
  modified_base 11: mod_base = OTHER; note = adenosine-3'-phosphate
  modified_base 12: mod_base = OTHER; note = adenosine-3'-phosphate
  modified_base 13: mod_base = OTHER; note = guanosine-3'-phosphate
  modified_base 14: mod_base = OTHER; note = uridine-3'-phosphate
  modified_base 15: mod_base = OTHER; note = uridine-3'-phosphate
  modified_base 16: mod_base = OTHER; note = guanosine-3'-phosphate
  modified_base 17: mod_base = OTHER; note = guanosine-3'-phosphate
  modified_base 18: mod_base = OTHER; note = cytidine-3'-phosphate
  modified_base 19: mod_base = OTHER; note = uridine-3'-phosphate
  misc_feature 1..19: note = RNA
  misc_feature 20..21: note = DNA
aggtctagaaaagttggcttt

SEQ ID NO: 1225 - DNA, 21 bp, synthetic construct
  source 1..21: mol_type = other DNA
  modified_base 1: mod_base = OTHER; note = adenosine-3'-phosphate
  modified_base 2: mod_base = OTHER; note = cytidine-3'-phosphate
  modified_base 3: mod_base = OTHER; note = uridine-3'-phosphate
  modified_base 4: mod_base = OTHER; note = uridine-3'-phosphate
  modified_base 5: mod_base = OTHER; note = uridine-3'-phosphate
  modified_base 6: mod_base = OTHER; note = uridine-3'-phosphate
  modified_base 7: mod_base = OTHER; note = cytidine-3'-phosphate
  modified_base 8: mod_base = OTHER; note = uridine-3'-phosphate
  modified_base 9: mod_base = OTHER; note = adenosine-3'-phosphate
  modified_base 10: mod_base = OTHER; note = guanosine-3'-phosphate
  modified_base 11: mod_base = OTHER; note = adenosine-3'-phosphate
  modified_base 12: mod_base = OTHER; note = cytidine-3'-phosphate
  modified_base 13: mod_base = OTHER; note = cytidine-3'-phosphate
  modified_base 14: mod_base = OTHER; note = uridine-3'-phosphate
  modified_base 15: mod_base = OTHER; note = guanosine-3'-phosphate
  modified_base 16: mod_base = OTHER; note = uridine-3'-phosphate
  modified_base 17: mod_base = OTHER; note = uridine-3'-phosphate
  modified_base 18: mod_base = OTHER; note = uridine-3'-phosphate
  modified_base 19: mod_base = OTHER; note = uridine-3'-phosphate
  misc_feature 1..19: note = RNA
  misc_feature 20..21: note = DNA
acttttctagacctgtttttt

SEQ ID NO: 1226 - DNA, 21 bp, synthetic construct
  source 1..21: mol_type = other DNA
  modified_base 1: mod_base = OTHER; note = adenosine-3'-phosphate
  modified_base 2: mod_base = OTHER; note = adenosine-3'-phosphate
  modified_base 3: mod_base = OTHER; note = adenosine-3'-phosphate
  modified_base 4: mod_base = OTHER; note = adenosine-3'-phosphate
  modified_base 5: mod_base = OTHER; note = cytidine-3'-phosphate
  modified_base 6: mod_base = OTHER; note = adenosine-3'-phosphate
  modified_base 7: mod_base = OTHER; note = guanosine-3'-phosphate
  modified_base 8: mod_base = OTHER; note = guanosine-3'-phosphate
  modified_base 9: mod_base = OTHER; note = uridine-3'-phosphate
  modified_base 10: mod_base = OTHER; note = cytidine-3'-phosphate
  modified_base 11: mod_base = OTHER; note = uridine-3'-phosphate
  modified_base 12: mod_base = OTHER; note = adenosine-3'-phosphate
  modified_base 13: mod_base = OTHER; note = guanosine-3'-phosphate
  modified_base 14: mod_base = OTHER; note = adenosine-3'-phosphate
  modified_base 15: mod_base = OTHER; note = adenosine-3'-phosphate
  modified_base 16: mod_base = OTHER; note = adenosine-3'-phosphate
  modified_base 17: mod_base = OTHER; note = adenosine-3'-phosphate
  modified_base 18: mod_base = OTHER; note = guanosine-3'-phosphate
  modified_base 19: mod_base = OTHER; note = uridine-3'-phosphate
  misc_feature 1..19: note = RNA
  misc_feature 20..21: note = DNA
aaaacaggtctagaaaagttt

SEQ ID NO: 1227 - DNA, 21 bp, synthetic construct
  source 1..21: mol_type = other DNA
  modified_base 1: mod_base = OTHER; note = uridine-3'-phosphate
  modified_base 2: mod_base = OTHER; note = uridine-3'-phosphate
  modified_base 3: mod_base = OTHER; note = cytidine-3'-phosphate
  modified_base 4: mod_base = OTHER; note = uridine-3'-phosphate
  modified_base 5: mod_base = OTHER; note = adenosine-3'-phosphate
  modified_base 6: mod_base = OTHER; note = guanosine-3'-phosphate
  modified_base 7: mod_base = OTHER; note = adenosine-3'-phosphate
  modified_base 8: mod_base = OTHER; note = cytidine-3'-phosphate
  modified_base 9: mod_base = OTHER; note = cytidine-3'-phosphate
  modified_base 10: mod_base = OTHER; note = uridine-3'-phosphate
  modified_base 11: mod_base = OTHER; note = guanosine-3'-phosphate
  modified_base 12: mod_base = OTHER; note = uridine-3'-phosphate
  modified_base 13: mod_base = OTHER; note = uridine-3'-phosphate
  modified_base 14: mod_base = OTHER; note = uridine-3'-phosphate
  modified_base 15: mod_base = OTHER; note = uridine-3'-phosphate
  modified_base 16: mod_base = OTHER; note = guanosine-3'-phosphate
  modified_base 17: mod_base = OTHER; note = cytidine-3'-phosphate
  modified_base 18: mod_base = OTHER; note = uridine-3'-phosphate
  modified_base 19: mod_base = OTHER; note = uridine-3'-phosphate
  modified_base 20: mod_base = OTHER; note = 2'-deoxythymidine-3'-phosphorothioate
  misc_feature 1..19: note = RNA
  misc_feature 20..21: note = DNA
ttctagacctgttttgctttt

SEQ ID NO: 1228 - DNA, 21 bp, synthetic construct
  source 1..21: mol_type = other DNA
  modified_base 1: mod_base = OTHER; note = adenosine-3'-phosphate
  modified_base 2: mod_base = OTHER; note = adenosine-3'-phosphate
  modified_base 3: mod_base = OTHER; note = guanosine-3'-phosphate
  modified_base 4: mod_base = OTHER; note = cytidine-3'-phosphate
  modified_base 5: mod_base = OTHER; note = adenosine-3'-phosphate
  modified_base 6: mod_base = OTHER; note = adenosine-3'-phosphate
  modified_base 7: mod_base = OTHER; note = adenosine-3'-phosphate
  modified_base 8: mod_base = OTHER; note = adenosine-3'-phosphate
  modified_base 9: mod_base = OTHER; note = cytidine-3'-phosphate
  modified_base 10: mod_base = OTHER; note = adenosine-3'-phosphate
  modified_base 11: mod_base = OTHER; note = guanosine-3'-phosphate
  modified_base 12: mod_base = OTHER; note = guanosine-3'-phosphate
  modified_base 13: mod_base = OTHER; note = uridine-3'-phosphate
  modified_base 14: mod_base = OTHER; note = cytidine-3'-phosphate
  modified_base 15: mod_base = OTHER; note = uridine-3'-phosphate
  modified_base 16: mod_base = OTHER; note = adenosine-3'-phosphate
  modified_base 17: mod_base = OTHER; note = guanosine-3'-phosphate
  modified_base 18: mod_base = OTHER; note = adenosine-3'-phosphate
  modified_base 19: mod_base = OTHER; note = adenosine-3'-phosphate
  modified_base 20: mod_base = OTHER; note = 2'-deoxythymidine-3'-phosphorothioate
  misc_feature 1..19: note = RNA
  misc_feature 20..21: note = DNA
aagcaaaacaggtctagaatt

SEQ ID NO: 1229 - DNA, 21 bp, synthetic construct
  source 1..21: mol_type = other DNA
  modified_base 1: mod_base = OTHER; note = 2'-O-methyluridine-3'-phosphate
  modified_base 2: mod_base = OTHER; note = 2'-O-methyluridine-3'-phosphate
  modified_base 3: mod_base = OTHER; note = 2'-O-methylcytidine-3'-phosphate
  modified_base 4: mod_base = OTHER; note = 2'-O-methyluridine-3'-phosphate
  modified_base 5: mod_base = OTHER; note = adenosine-3'-phosphate
  modified_base 6: mod_base = OTHER; note = guanosine-3'-phosphate
  modified_base 7: mod_base = OTHER; note = adenosine-3'-phosphate
  modified_base 8: mod_base = OTHER; note = 2'-O-methylcytidine-3'-phosphate
  modified_base 9: mod_base = OTHER; note = 2'-O-methylcytidine-3'-phosphate
  modified_base 10: mod_base = OTHER; note = 2'-O-methyluridine-3'-phosphate
  modified_base 11: mod_base = OTHER; note = guanosine-3'-phosphate
  modified_base 12: mod_base = OTHER; note = 2'-O-methyluridine-3'-phosphate
  modified_base 13: mod_base = OTHER; note = 2'-O-methyluridine-3'-phosphate
  modified_base 14: mod_base = OTHER; note = 2'-O-methyluridine-3'-phosphate
  modified_base 15: mod_base = OTHER; note = 2'-O-methyluridine-3'-phosphate
  modified_base 16: mod_base = OTHER; note = guanosine-3'-phosphate
  modified_base 17: mod_base = OTHER; note = 2'-O-methylcytidine-3'-phosphate
  modified_base 18: mod_base = OTHER; note = 2'-O-methyluridine-3'-phosphate
  modified_base 19: mod_base = OTHER; note = 2'-O-methyluridine-3'-phosphate
  modified_base 20: mod_base = OTHER; note = 2'-deoxythymidine-3'-phosphorothioate
  misc_feature 1..19: note = RNA
  misc_feature 20..21: note = DNA
ttctagacctgttttgctttt

SEQ ID NO: 1230 - DNA, 21 bp, synthetic construct
  source 1..21: mol_type = other DNA
  modified_base 1: mod_base = OTHER; note = adenosine-3'-phosphate
  modified_base 2: mod_base = OTHER; note = adenosine-3'-phosphate
  modified_base 3: mod_base = OTHER; note = guanosine-3'-phosphate
  modified_base 4: mod_base = OTHER; note = 2'-O-methylcytidine-3'-phosphate
  modified_base 5: mod_base = OTHER; note = adenosine-3'-phosphate
  modified_base 6: mod_base = OTHER; note = adenosine-3'-phosphate
  modified_base 7: mod_base = OTHER; note = adenosine-3'-phosphate
  modified_base 8: mod_base = OTHER; note = adenosine-3'-phosphate
  modified_base 9: mod_base = OTHER; note = 2'-O-methylcytidine-3'-phosphate
  modified_base 10: mod_base = OTHER; note = adenosine-3'-phosphate
  modified_base 11: mod_base = OTHER; note = guanosine-3'-phosphate
  modified_base 12: mod_base = OTHER; note = guanosine-3'-phosphate
  modified_base 13: mod_base = OTHER; note = uridine-3'-phosphate
  modified_base 14: mod_base = OTHER; note = cytidine-3'-phosphate
  modified_base 15: mod_base = OTHER; note = 2'-O-methyluridine-3'-phosphate
  modified_base 16: mod_base = OTHER; note = adenosine-3'-phosphate
  modified_base 17: mod_base = OTHER; note = guanosine-3'-phosphate
  modified_base 18: mod_base = OTHER; note = adenosine-3'-phosphate
  modified_base 19: mod_base = OTHER; note = adenosine-3'-phosphate
  modified_base 20: mod_base = OTHER; note = 2'-deoxythymidine-3'-phosphorothioate
  misc_feature 1..19: note = RNA
  misc_feature 20..21: note = DNA
aagcaaaacaggtctagaatt

SEQ ID NO: 1231 - DNA, 21 bp, synthetic construct
  source 1..21: mol_type = other DNA
  modified_base 1: mod_base = OTHER; note = 2'-deoxy-2'-fluorouridine-3'-phosphate
  modified_base 2: mod_base = OTHER; note = 2'-O-methyluridine-3'-phosphate
  modified_base 3: mod_base = OTHER; note = 2'-deoxy-2'-fluorocytidine-3'-phosphate
  modified_base 4: mod_base = OTHER; note = 2'-O-methyluridine-3'-phosphate
  modified_base 5: mod_base = OTHER; note = 2'-deoxy-2'-fluoroadenosine-3'-phosphate
  modified_base 6: mod_base = OTHER; note = 2'-O-methylguanosine-3'-phosphate
  modified_base 7: mod_base = OTHER; note = 2'-deoxy-2'-fluoroadenosine-3'-phosphate
  modified_base 8: mod_base = OTHER; note = 2'-O-methylcytidine-3'-phosphate
  modified_base 9: mod_base = OTHER; note = 2'-deoxy-2'-fluorocytidine-3'-phosphate
  modified_base 10: mod_base = OTHER; note = 2'-O-methyluridine-3'-phosphate
  modified_base 11: mod_base = OTHER; note = 2'-deoxy-2'-fluoroguanosine-3'-phosphate
  modified_base 12: mod_base = OTHER; note = 2'-O-methyluridine-3'-phosphate
  modified_base 13: mod_base = OTHER; note = 2'-deoxy-2'-fluorouridine-3'-phosphate
  modified_base 14: mod_base = OTHER; note = 2'-O-methyluridine-3'-phosphate
  modified_base 15: mod_base = OTHER; note = 2'-deoxy-2'-fluorouridine-3'-phosphate
  modified_base 16: mod_base = OTHER; note = 2'-O-methylguanosine-3'-phosphate
  modified_base 17: mod_base = OTHER; note = 2'-deoxy-2'-fluorocytidine-3'-phosphate
  modified_base 18: mod_base = OTHER; note = 2'-O-methyluridine-3'-phosphate
  modified_base 19: mod_base = OTHER; note = 2'-deoxy-2'-fluorouridine-3'-phosphate
  modified_base 20: mod_base = OTHER; note = 2'-deoxythymidine-3'-phosphorothioate
  misc_feature 1..19: note = RNA
  misc_feature 20..21: note = DNA
ttctagacctgttttgctttt

SEQ ID NO: 1232 - DNA, 21 bp, synthetic construct
  source 1..21: mol_type = other DNA
  modified_base 1: mod_base = OTHER; note = 2'-O-methyladenosine-3'-phosphate 5'phosphate
  modified_base 2: mod_base = OTHER; note = 2'-deoxy-2'-fluoroadenosine-3'-phosphate
  modified_base 3: mod_base = OTHER; note = 2'-O-methylguanosine-3'-phosphate
  modified_base 4: mod_base = OTHER; note = 2'-deoxy-2'-fluorocytidine-3'-phosphate
  modified_base 5: mod_base = OTHER; note = 2'-O-methyladenosine-3'-phosphate
  modified_base 6: mod_base = OTHER; note = 2'-deoxy-2'-fluoroadenosine-3'-phosphate
  modified_base 7: mod_base = OTHER; note = 2'-O-methyladenosine-3'-phosphate
  modified_base 8: mod_base = OTHER; note = 2'-deoxy-2'-fluoroadenosine-3'-phosphate
  modified_base 9: mod_base = OTHER; note = 2'-O-methylcytidine-3'-phosphate
  modified_base 10: mod_base = OTHER; note = 2'-deoxy-2'-fluoroadenosine-3'-phosphate
  modified_base 11: mod_base = OTHER; note = 2'-O-methylguanosine-3'-phosphate
  modified_base 12: mod_base = OTHER; note = 2'-deoxy-2'-fluoroguanosine-3'-phosphate
  modified_base 13: mod_base = OTHER; note = 2'-O-methyluridine-3'-phosphate
  modified_base 14: mod_base = OTHER; note = 2'-deoxy-2'-fluorocytidine-3'-phosphate
  modified_base 15: mod_base = OTHER; note = 2'-O-methyluridine-3'-phosphate
  modified_base 16: mod_base = OTHER; note = 2'-deoxy-2'-fluoroadenosine-3'-phosphate
  modified_base 17: mod_base = OTHER; note = 2'-O-methylguanosine-3'-phosphate
  modified_base 18: mod_base = OTHER; note = 2'-deoxy-2'-fluoroadenosine-3'-phosphate
  modified_base 19: mod_base = OTHER; note = 2'-O-methyladenosine-3'-phosphate
  modified_base 20: mod_base = OTHER; note = 2'-deoxythymidine-3'-phosphorothioate
  misc_feature 1..19: note = RNA
  misc_feature 20..21: note = DNA
aagcaaaacaggtctagaatt

SEQ ID NO: 1233 - DNA, 21 bp, synthetic construct
  source 1..21: mol_type = other DNA
  modified_base 1: mod_base = OTHER; note = 2'-deoxy-2'-fluorouridine-3'-phosphate
  modified_base 2: mod_base = OTHER; note = 2'-deoxy-2'-fluorouridine-3'-phosphate
  modified_base 3: mod_base = OTHER; note = 2'-deoxy-2'-fluorocytidine-3'-phosphate
  modified_base 4: mod_base = OTHER; note = 2'-deoxy-2'-fluorouridine-3'-phosphate
  modified_base 5: mod_base = OTHER; note = adenosine-3'-phosphate
  modified_base 6: mod_base = OTHER; note = guanosine-3'-phosphate
  modified_base 7: mod_base = OTHER; note = adenosine-3'-phosphate
  modified_base 8: mod_base = OTHER; note = 2'-deoxy-2'-fluorocytidine-3'-phosphate
  modified_base 9: mod_base = OTHER; note = 2'-deoxy-2'-fluorocytidine-3'-phosphate
  modified_base 10: mod_base = OTHER; note = 2'-deoxy-2'-fluorouridine-3'-phosphate
  modified_base 11: mod_base = OTHER; note = guanosine-3'-phosphate
  modified_base 12: mod_base = OTHER; note = 2'-deoxy-2'-fluorouridine-3'-phosphate
  modified_base 13: mod_base = OTHER; note = 2'-deoxy-2'-fluorouridine-3'-phosphate
  modified_base 14: mod_base = OTHER; note = 2'-deoxy-2'-fluorouridine-3'-phosphate
  modified_base 15: mod_base = OTHER; note = 2'-deoxy-2'-fluorouridine-3'-phosphate
  modified_base 16: mod_base = OTHER; note = guanosine-3'-phosphate
  modified_base 17: mod_base = OTHER; note = 2'-deoxy-2'-fluorocytidine-3'-phosphate
  modified_base 18: mod_base = OTHER; note = 2'-deoxy-2'-fluorouridine-3'-phosphate
  modified_base 19: mod_base = OTHER; note = 2'-deoxy-2'-fluorouridine-3'-phosphate
  modified_base 20: mod_base = OTHER; note = 2'-deoxythymidine-3'-phosphorothioate
  misc_feature 1..19: note = RNA
  misc_feature 20..21: note = DNA
ttctagacctgttttgctttt

SEQ ID NO: 1234 - DNA, 21 bp, synthetic construct
  source 1..21: mol_type = other DNA
  modified_base 1: mod_base = OTHER; note = adenosine-3'-phosphate
  modified_base 2: mod_base = OTHER; note = adenosine-3'-phosphate
  modified_base 3: mod_base = OTHER; note = guanosine-3'-phosphate
  modified_base 4: mod_base = OTHER; note = 2'-deoxy-2'-fluorocytidine-3'-phosphate
  modified_base 5: mod_base = OTHER; note = adenosine-3'-phosphate
  modified_base 6: mod_base = OTHER; note = adenosine-3'-phosphate
  modified_base 7: mod_base = OTHER; note = adenosine-3'-phosphate
  modified_base 8: mod_base = OTHER; note = adenosine-3'-phosphate
  modified_base 9: mod_base = OTHER; note = 2'-deoxy-2'-fluorocytidine-3'-phosphate
  modified_base 10: mod_base = OTHER; note = adenosine-3'-phosphate
  modified_base 11: mod_base = OTHER; note = guanosine-3'-phosphate
  modified_base 12: mod_base = OTHER; note = guanosine-3'-phosphate
  modified_base 13: mod_base = OTHER; note = 2'-deoxy-2'-fluorouridine-3'-phosphate
  modified_base 14: mod_base = OTHER; note = 2'-deoxy-2'-fluorocytidine-3'-phosphate
  modified_base 15: mod_base = OTHER; note = 2'-deoxy-2'-fluorouridine-3'-phosphate
  modified_base 16: mod_base = OTHER; note = adenosine-3'-phosphate
  modified_base 17: mod_base = OTHER; note = guanosine-3'-phosphate
  modified_base 18: mod_base = OTHER; note = adenosine-3'-phosphate
  modified_base 19: mod_base = OTHER; note = adenosine-3'-phosphate
  modified_base 20: mod_base = OTHER; note = 2'-deoxythymidine-3'-phosphorothioate
  misc_feature 1..19: note = RNA
  misc_feature 20..21: note = DNA
aagcaaaacaggtctagaatt

SEQ ID NO: 1235 - DNA, 21 bp, synthetic construct
  source 1..21: mol_type = other DNA
  modified_base 1: mod_base = OTHER; note = uridine-3'-phosphate
  modified_base 2: mod_base = OTHER; note = 2'-O-methyluridine-3'-phosphate
  modified_base 3: mod_base = OTHER; note = cytidine-3'-phosphate
  modified_base 4: mod_base = OTHER; note = 2'-O-methyluridine-3'-phosphate
  modified_base 5: mod_base = OTHER; note = adenosine-3'-phosphate
  modified_base 6: mod_base = OTHER; note = 2'-O-methylguanosine-3'-phosphate
  modified_base 7: mod_base = OTHER; note = adenosine-3'-phosphate
  modified_base 8: mod_base = OTHER; note = 2'-O-methylcytidine-3'-phosphate
  modified_base 9: mod_base = OTHER; note = cytidine-3'-phosphate
  modified_base 10: mod_base = OTHER; note = 2'-O-methyluridine-3'-phosphate
  modified_base 11: mod_base = OTHER; note = guanosine-3'-phosphate
  modified_base 12: mod_base = OTHER; note = 2'-O-methyluridine-3'-phosphate
  modified_base 13: mod_base = OTHER; note = uridine-3'-phosphate
  modified_base 14: mod_base = OTHER; note = 2'-O-methyluridine-3'-phosphate
  modified_base 15: mod_base = OTHER; note = uridine-3'-phosphate
  modified_base 16: mod_base = OTHER; note = 2'-O-methylguanosine-3'-phosphate
  modified_base 17: mod_base = OTHER; note = cytidine-3'-phosphate
  modified_base 18: mod_base = OTHER; note = 2'-O-methyluridine-3'-phosphate
  modified_base 19: mod_base = OTHER; note = uridine-3'-phosphate
  modified_base 20: mod_base = OTHER; note = 2'-deoxythymidine-3'-phosphorothioate
  misc_feature 1..19: note = RNA
  misc_feature 20..21: note = DNA
ttctagacctgttttgctttt

SEQ ID NO: 1236 - DNA, 21 bp, synthetic construct
  source 1..21: mol_type = other DNA
  modified_base 1: mod_base = OTHER; note = 2'-O-methyladenosine-3'-phosphate 5'phosphate
  modified_base 2: mod_base = OTHER; note = 2'-deoxy-2'-fluoroadenosine-3'-phosphate
  modified_base 3: mod_base = OTHER; note = 2'-O-methylguanosine-3'-phosphate
  modified_base 4: mod_base = OTHER; note = 2'-deoxy-2'-fluorocytidine-3'-phosphate
  modified_base 5: mod_base = OTHER; note = 2'-O-methyladenosine-3'-phosphate
  modified_base 6: mod_base = OTHER; note = 2'-deoxy-2'-fluoroadenosine-3'-phosphate
  modified_base 7: mod_base = OTHER; note = 2'-O-methyladenosine-3'-phosphate
  modified_base 8: mod_base = OTHER; note = 2'-deoxy-2'-fluoroadenosine-3'-phosphate
  modified_base 9: mod_base = OTHER; note = 2'-O-methylcytidine-3'-phosphate
  modified_base 10: mod_base = OTHER; note = 2'-deoxy-2'-fluoroadenosine-3'-phosphate
  modified_base 11: mod_base = OTHER; note = 2'-O-methylguanosine-3'-phosphate
  modified_base 12: mod_base = OTHER; note = 2'-deoxy-2'-fluoroguanosine-3'-phosphate
  modified_base 13: mod_base = OTHER; note = 2'-O-methyluridine-3'-phosphate
  modified_base 14: mod_base = OTHER; note = 2'-deoxy-2'-fluorocytidine-3'-phosphate
  modified_base 15: mod_base = OTHER; note = 2'-O-methyluridine-3'-phosphate
  modified_base 16: mod_base = OTHER; note = 2'-deoxy-2'-fluoroadenosine-3'-phosphate
  modified_base 17: mod_base = OTHER; note = 2'-O-methylguanosine-3'-phosphate
  modified_base 18: mod_base = OTHER; note = 2'-deoxy-2'-fluoroadenosine-3'-phosphate
  modified_base 19: mod_base = OTHER; note = 2'-O-methyladenosine-3'-phosphate
  modified_base 20: mod_base = OTHER; note = 2'-deoxythymidine-3'-phosphorothioate
  misc_feature 1..19: note = RNA
  misc_feature 20..21: note = DNA
aagcaaaacaggtctagaatt

SEQ ID NO: 1237 - DNA, 21 bp, synthetic construct
  source 1..21: mol_type = other DNA
  modified_base 1: mod_base = OTHER; note = uridine-3'-phosphate
  modified_base 2: mod_base = OTHER; note = 2'-O-methyluridine-3'-phosphate
  modified_base 3: mod_base = OTHER; note = cytidine-3'-phosphate
  modified_base 4: mod_base = OTHER; note = 2'-O-methyluridine-3'-phosphate
  modified_base 5: mod_base = OTHER; note = adenosine-3'-phosphate
  modified_base 6: mod_base = OTHER; note = 2'-O-methylguanosine-3'-phosphate
  modified_base 7: mod_base = OTHER; note = adenosine-3'-phosphate
  modified_base 8: mod_base = OTHER; note = 2'-O-methylcytidine-3'-phosphate
  modified_base 9: mod_base = OTHER; note = cytidine-3'-phosphate
  modified_base 10: mod_base = OTHER; note = 2'-O-methyluridine-3'-phosphate
  modified_base 11: mod_base = OTHER; note = guanosine-3'-phosphate
  modified_base 12: mod_base = OTHER; note = 2'-O-methyluridine-3'-phosphate
  modified_base 13: mod_base = OTHER; note = uridine-3'-phosphate
  modified_base 14: mod_base = OTHER; note = 2'-O-methyluridine-3'-phosphate
  modified_base 15: mod_base = OTHER; note = uridine-3'-phosphate
  modified_base 16: mod_base = OTHER; note = 2'-O-methylguanosine-3'-phosphate
  modified_base 17: mod_base = OTHER; note = cytidine-3'-phosphate
  modified_base 18: mod_base = OTHER; note = 2'-O-methyluridine-3'-phosphate
  modified_base 19: mod_base = OTHER; note = uridine-3'-phosphate
  modified_base 20: mod_base = OTHER; note = 2'-deoxythymidine-3'-phosphorothioate
  misc_feature 1..19: note = RNA
  misc_feature 20..21: note = DNA
ttctagacctgttttgctttt

SEQ ID NO: 1238 - DNA, 21 bp, synthetic construct
  source 1..21: mol_type = other DNA
  modified_base 1: mod_base = OTHER; note = adenosine-3'-phosphate
  modified_base 2: mod_base = OTHER; note = adenosine-3'-phosphate
  modified_base 3: mod_base = OTHER; note = guanosine-3'-phosphate
  modified_base 4: mod_base = OTHER; note = 2'-deoxy-2'-fluorocytidine-3'-phosphate
  modified_base 5: mod_base = OTHER; note = adenosine-3'-phosphate
  modified_base 6: mod_base = OTHER; note = adenosine-3'-phosphate
  modified_base 7: mod_base = OTHER; note = adenosine-3'-phosphate
  modified_base 8: mod_base = OTHER; note = adenosine-3'-phosphate
  modified_base 9: mod_base = OTHER; note = 2'-deoxy-2'-fluorocytidine-3'-phosphate
  modified_base 10: mod_base = OTHER; note = adenosine-3'-phosphate
  modified_base 11: mod_base = OTHER; note = guanosine-3'-phosphate
  modified_base 12: mod_base = OTHER; note = guanosine-3'-phosphate
  modified_base 13: mod_base = OTHER; note = 2'-deoxy-2'-fluorouridine-3'-phosphate
  modified_base 14: mod_base = OTHER; note = 2'-deoxy-2'-fluorocytidine-3'-phosphate
  modified_base 15: mod_base = OTHER; note = 2'-deoxy-2'-fluorouridine-3'-phosphate
  modified_base 16: mod_base = OTHER; note = adenosine-3'-phosphate
  modified_base 17: mod_base = OTHER; note = guanosine-3'-phosphate
  modified_base 18: mod_base = OTHER; note = adenosine-3'-phosphate
  modified_base 19: mod_base = OTHER; note = adenosine-3'-phosphate
  modified_base 20: mod_base = OTHER; note = 2'-deoxythymidine-3'-phosphorothioate
  misc_feature 1..19: note = RNA
  misc_feature 20..21: note = DNA
aagcaaaacaggtctagaatt

SEQ ID NO: 1239 - DNA, 21 bp, synthetic construct
  source 1..21: mol_type = other DNA
  modified_base 1: mod_base = OTHER; note = 2'-deoxy-2'-fluorouridine-3'-phosphate
  modified_base 2: mod_base = OTHER; note = 2'-O-methyluridine-3'-phosphate
  modified_base 3: mod_base = OTHER; note = 2'-deoxy-2'-fluorocytidine-3'-phosphate
  modified_base 4: mod_base = OTHER; note = 2'-O-methyluridine-3'-phosphate
  modified_base 5: mod_base = OTHER; note = 2'-deoxy-2'-fluoroadenosine-3'-phosphate
  modified_base 6: mod_base = OTHER; note = 2'-O-methylguanosine-3'-phosphate
  modified_base 7: mod_base = OTHER; note = 2'-deoxy-2'-fluoroadenosine-3'-phosphate
  modified_base 8: mod_base = OTHER; note = 2'-O-methylcytidine-3'-phosphate
  modified_base 9: mod_base = OTHER; note = 2'-deoxy-2'-fluorocytidine-3'-phosphate
  modified_base 10: mod_base = OTHER; note = 2'-O-methyluridine-3'-phosphate
  modified_base 11: mod_base = OTHER; note = 2'-deoxy-2'-fluoroguanosine-3'-phosphate
  modified_base 12: mod_base = OTHER; note = 2'-O-methyluridine-3'-phosphate
  modified_base 13: mod_base = OTHER; note = 2'-deoxy-2'-fluorouridine-3'-phosphate
  modified_base 14: mod_base = OTHER; note = 2'-O-methyluridine-3'-phosphate
  modified_base 15: mod_base = OTHER; note = 2'-deoxy-2'-fluorouridine-3'-phosphate
  modified_base 16: mod_base = OTHER; note = modified guanosine 3'-phosphate
  modified_base 17: mod_base = OTHER; note = 2'-deoxy-2'-fluorocytidine-3'-phosphate
  modified_base 18: mod_base = OTHER; note = 2'-O-methyluridine-3'-phosphate
  modified_base 19: mod_base = OTHER; note = 2'-deoxy-2'-fluorouridine-3'-phosphate
  modified_base 20: mod_base = OTHER; note = 2'-deoxythymidine-3'-phosphorothioate
  modified_base 21: mod_base = OTHER; note = 2'-deoxythymidine-3'-phosphate
  misc_feature 1..19: note = RNA
  misc_feature 20..21: note = DNA
ttctagacctgttttgctttt

SEQ ID NO: 1240 - DNA, 21 bp, synthetic construct
  source 1..21: mol_type = other DNA
  modified_base 1: mod_base = OTHER; note = adenosine-3'-phosphate
  modified_base 2: mod_base = OTHER; note = adenosine-3'-phosphate
  modified_base 3: mod_base = OTHER; note = guanosine-3'-phosphate
  modified_base 4: mod_base = OTHER; note = 2'-O-methylcytidine-3'-phosphate
  modified_base 5: mod_base = OTHER; note = adenosine-3'-phosphate
  modified_base 6: mod_base = OTHER; note = 2'-O-methyladenosine-3'-phosphate
  modified_base 7: mod_base = OTHER; note = 2'-O-methyladenosine-3'-phosphate
  modified_base 8: mod_base = OTHER; note = adenosine-3'-phosphate
  modified_base 9: mod_base = OTHER; note = cytidine-3'-phosphate
  modified_base 10: mod_base = OTHER; note = 2'-O-methyladenosine-3'-phosphate
  modified_base 11: mod_base = OTHER; note = 2'-O-methylguanosine-3'-phosphate
  modified_base 12: mod_base = OTHER; note = guanosine-3'-phosphate
  modified_base 13: mod_base = OTHER; note = uridine-3'-phosphate
  modified_base 14: mod_base = OTHER; note = cytidine-3'-phosphate
  modified_base 15: mod_base = OTHER; note = uridine-3'-phosphate
  modified_base 16: mod_base = OTHER; note = adenosine-3'-phosphate
  modified_base 17: mod_base = OTHER; note = 2'-O-methylguanosine-3'-phosphate
  modified_base 18: mod_base = OTHER; note = 2'-O-methyladenosine-3'-phosphate
  modified_base 19: mod_base = OTHER; note = 2'-O-methyladenosine-3'-phosphate
  modified_base 20: mod_base = OTHER; note = 2'-deoxythymidine-3'-phosphorothioate
  misc_feature 1..19: note = RNA
  misc_feature 20..21: note = DNA
aagcaaaacaggtctagaatt

SEQ ID NO: 1241 - DNA, 21 bp, synthetic construct
  source 1..21: mol_type = other DNA
  modified_base 1: mod_base = OTHER; note = 2'-deoxy-2'-fluorouridine-3'-phosphate
  modified_base 2: mod_base = OTHER; note = 2'-deoxy-2'-fluorouridine-3'-phosphate
  modified_base 3: mod_base = OTHER; note = 2'-deoxy-2'-fluorocytidine-3'-phosphate
  modified_base 4: mod_base = OTHER; note = 2'-deoxy-2'-fluorouridine-3'-phosphate
  modified_base 5: mod_base = OTHER; note = adenosine-3'-phosphate
  modified_base 6: mod_base = OTHER; note = guanosine-3'-phosphate
  modified_base 7: mod_base = OTHER; note = adenosine-3'-phosphate
  modified_base 8: mod_base = OTHER; note = 2'-deoxy-2'-fluorocytidine-3'-phosphate
  modified_base 9: mod_base = OTHER; note = 2'-deoxy-2'-fluorocytidine-3'-phosphate
  modified_base 10: mod_base = OTHER; note = 2'-deoxy-2'-fluorouridine-3'-phosphate
  modified_base 11: mod_base = OTHER; note = guanosine-3'-phosphate
  modified_base 12: mod_base = OTHER; note = 2'-deoxy-2'-fluorouridine-3'-phosphate
  modified_base 13: mod_base = OTHER; note = 2'-deoxy-2'-fluorouridine-3'-phosphate
  modified_base 14: mod_base = OTHER; note = 2'-deoxy-2'-fluorouridine-3'-phosphate
  modified_base 15: mod_base = OTHER; note = 2'-deoxy-2'-fluorouridine-3'-phosphate
  modified_base 16: mod_base = OTHER; note = guanosine-3'-phosphate
  modified_base 17: mod_base = OTHER; note = 2'-deoxy-2'-fluorocytidine-3'-phosphate
  modified_base 18: mod_base = OTHER; note = 2'-deoxy-2'-fluorouridine-3'-phosphate
  modified_base 19: mod_base = OTHER; note = 2'-deoxy-2'-fluorouridine-3'-phosphate
  modified_base 20: mod_base = OTHER; note = 2'-deoxythymidine-3'-phosphorothioate
  misc_feature 1..19: note = RNA
  misc_feature 20..21: note = DNA
ttctagacctgttttgctttt

SEQ ID NO: 1242 - DNA, 21 bp, synthetic construct
  source 1..21: mol_type = other DNA
  modified_base 1: mod_base = OTHER; note = adenosine-3'-phosphate
  modified_base 2: mod_base = OTHER; note = adenosine-3'-phosphate
  modified_base 3: mod_base = OTHER; note = guanosine-3'-phosphate
  modified_base 4: mod_base = OTHER; note = 2'-O-methylcytidine-3'-phosphate
  modified_base 5: mod_base = OTHER; note = adenosine-3'-phosphate
  modified_base 6: mod_base = OTHER; note = 2'-O-methyladenosine-3'-phosphate
  modified_base 7: mod_base = OTHER; note = 2'-O-methyladenosine-3'-phosphate
  modified_base 8: mod_base = OTHER; note = adenosine-3'-phosphate
  modified_base 9: mod_base = OTHER; note = cytidine-3'-phosphate
  modified_base 10: mod_base = OTHER; note = 2'-O-methyladenosine-3'-phosphate
  modified_base 11: mod_base = OTHER; note = 2'-O-methylguanosine-3'-phosphate
  modified_base 12: mod_base = OTHER; note = guanosine-3'-phosphate
  modified_base 13: mod_base = OTHER; note = uridine-3'-phosphate
  modified_base 14: mod_base = OTHER; note = cytidine-3'-phosphate
  modified_base 15: mod_base = OTHER; note = uridine-3'-phosphate
  modified_base 16: mod_base = OTHER; note = adenosine-3'-phosphate
  modified_base 17: mod_base = OTHER; note = 2'-O-methylguanosine-3'-phosphate
  modified_base 18: mod_base = OTHER; note = 2'-O-methyladenosine-3'-phosphate
  modified_base 19: mod_base = OTHER; note = 2'-O-methyladenosine-3'-phosphate
  modified_base 20: mod_base = OTHER; note = 2'-deoxythymidine-3'-phosphorothioate
  misc_feature 1..19: note = RNA
  misc_feature 20..21: note = DNA
aagcaaaacaggtctagaatt

SEQ ID NO: 1243 - DNA, 21 bp, synthetic construct
  source 1..21: mol_type = other DNA
  modified_base 1: mod_base = OTHER; note = uridine-3'-phosphate
  modified_base 2: mod_base = OTHER; note = 2'-O-methyluridine-3'-phosphate
  modified_base 3: mod_base = OTHER; note = cytidine-3'-phosphate
  modified_base 4: mod_base = OTHER; note = 2'-O-methyluridine-3'-phosphate
  modified_base 5: mod_base = OTHER; note = adenosine-3'-phosphate
  modified_base 6: mod_base = OTHER; note = 2'-O-methylguanosine-3'-phosphate
  modified_base 7: mod_base = OTHER; note = adenosine-3'-phosphate
  modified_base 8: mod_base = OTHER; note = 2'-O-methylcytidine-3'-phosphate
  modified_base 9: mod_base = OTHER; note = cytidine-3'-phosphate
  modified_base 10: mod_base = OTHER; note = 2'-O-methyluridine-3'-phosphate
  modified_base 11: mod_base = OTHER; note = guanosine-3'-phosphate
  modified_base 12: mod_base = OTHER; note = 2'-O-methyluridine-3'-phosphate
  modified_base 13: mod_base = OTHER; note = uridine-3'-phosphate
  modified_base 14: mod_base = OTHER; note = 2'-O-methyluridine-3'-phosphate
  modified_base 15: mod_base = OTHER; note = uridine-3'-phosphate
  modified_base 16: mod_base = OTHER; note = 2'-O-methylguanosine-3'-phosphate
  modified_base 17: mod_base = OTHER; note = cytidine-3'-phosphate
  modified_base 18: mod_base = OTHER; note = 2'-O-methyluridine-3'-phosphate
  modified_base 19: mod_base = OTHER; note = uridine-3'-phosphate
  modified_base 20: mod_base = OTHER; note = 2'-deoxythymidine-3'-phosphorothioate
  misc_feature 1..19: note = RNA
  misc_feature 20..21: note = DNA
ttctagacctgttttgctttt

SEQ ID NO: 1244 - DNA, 21 bp, synthetic construct
  source 1..21: mol_type = other DNA
  modified_base 1: mod_base = OTHER; note = adenosine-3'-phosphate
  modified_base 2: mod_base = OTHER; note = adenosine-3'-phosphate
  modified_base 3: mod_base = OTHER; note = guanosine-3'-phosphate
  modified_base 4: mod_base = OTHER; note = 2'-O-methylcytidine-3'-phosphate
  modified_base 5: mod_base = OTHER; note = adenosine-3'-phosphate
  modified_base 6: mod_base = OTHER; note = 2'-O-methyladenosine-3'-phosphate
  modified_base 7: mod_base = OTHER; note = 2'-O-methyladenosine-3'-phosphate
  modified_base 8: mod_base = OTHER; note = adenosine-3'-phosphate
  modified_base 9: mod_base = OTHER; note = cytidine-3'-phosphate
  modified_base 10: mod_base = OTHER; note = 2'-O-methyladenosine-3'-phosphate
  modified_base 11: mod_base = OTHER; note = 2'-O-methylguanosine-3'-phosphate
  modified_base 12: mod_base = OTHER; note = guanosine-3'-phosphate
  modified_base 13: mod_base = OTHER; note = uridine-3'-phosphate
  modified_base 14: mod_base = OTHER; note = cytidine-3'-phosphate
  modified_base 15: mod_base = OTHER; note = uridine-3'-phosphate
  modified_base 16: mod_base = OTHER; note = adenosine-3'-phosphate
  modified_base 17: mod_base = OTHER; note = 2'-O-methylguanosine-3'-phosphate
  modified_base 18: mod_base = OTHER; note = 2'-O-methyladenosine-3'-phosphate
  modified_base 19: mod_base = OTHER; note = 2'-O-methyladenosine-3'-phosphate
  modified_base 20: mod_base = OTHER; note = 2'-deoxythymidine-3'-phosphorothioate
  misc_feature 1..19: note = RNA
  misc_feature 20..21: note = DNA
aagcaaaacaggtctagaatt

SEQ ID NO: 1245 - DNA, 21 bp, synthetic construct
  source 1..21: mol_type = other DNA
  modified_base 1: mod_base = OTHER; note = 2'-deoxy-2'-fluorocytidine-3'-phosphate
  modified_base 2: mod_base = OTHER; note = 2'-O-methyladenosine-3'-phosphate
  modified_base 3: mod_base = OTHER; note = 2'-deoxy-2'-fluorouridine-3'-phosphate
  modified_base 4: mod_base = OTHER; note = 2'-O-methyladenosine-3'-phosphate
  modified_base 5: mod_base = OTHER; note = 2'-deoxy-2'-fluoroguanosine-3'-phosphate
  modified_base 6: mod_base = OTHER; note = 2'-O-methylguanosine-3'-phosphate
  modified_base 7: mod_base = OTHER; note = 2'-deoxy-2'-fluorocytidine-3'-phosphate
  modified_base 8: mod_base = OTHER; note = 2'-O-methylcytidine-3'-phosphate
  modified_base 9: mod_base = OTHER; note = 2'-deoxy-2'-fluorouridine-3'-phosphate
  modified_base 10: mod_base = OTHER; note = 2'-O-methylguanosine-3'-phosphate
  modified_base 11: mod_base = OTHER; note = 2'-deoxy-2'-fluoroguanosine-3'-phosphate
  modified_base 12: mod_base = OTHER; note = 2'-O-methyladenosine-3'-phosphate
  modified_base 13: mod_base = OTHER; note = 2'-deoxy-2'-fluoroguanosine-3'-phosphate
  modified_base 14: mod_base = OTHER; note = 2'-O-methyluridine-3'-phosphate
  modified_base 15: mod_base = OTHER; note = 2'-deoxy-2'-fluorouridine-3'-phosphate
  modified_base 16: mod_base = OTHER; note = 2'-O-methyluridine-3'-phosphate
  modified_base 17: mod_base = OTHER; note = 2'-deoxy-2'-fluoroadenosine-3'-phosphate
  modified_base 18: mod_base = OTHER; note = 2'-O-methyluridine-3'-phosphate
  modified_base 19: mod_base = OTHER; note = 2'-deoxy-2'-fluorouridine-3'-phosphate
  modified_base 20: mod_base = OTHER; note = 2'-deoxythymidine-3'-phosphorothioate
  misc_feature 1..19: note = RNA
  misc_feature 20..21: note = DNA
cataggcctggagtttatttt

SEQ ID NO: 1246 - DNA, 21 bp, synthetic construct
  source 1..21: mol_type = other DNA
  modified_base 1: mod_base = OTHER; note = 2'-O-methyladenosine-3'-phosphate 5'phosphate
  modified_base 2: mod_base = OTHER; note = 2'-deoxy-2'-fluoroadenosine-3'-phosphate
  modified_base 3: mod_base = OTHER; note = 2'-O-methyluridine-3'-phosphate
  modified_base 4: mod_base = OTHER; note = 2'-deoxy-2'-fluoroadenosine-3'-phosphate
  modified_base 5: mod_base = OTHER; note = 2'-O-methyladenosine-3'-phosphate
  modified_base 6: mod_base = OTHER; note = 2'-deoxy-2'-fluoroadenosine-3'-phosphate
  modified_base 7: mod_base = OTHER; note = 2'-O-methylcytidine-3'-phosphate
  modified_base 8: mod_base = OTHER; note = 2'-deoxy-2'-fluorouridine-3'-phosphate
  modified_base 9: mod_base = OTHER; note = 2'-O-methylcytidine-3'-phosphate
  modified_base 10: mod_base = OTHER; note = 2'-deoxy-2'-fluorocytidine-3'-phosphate
  modified_base 11: mod_base = OTHER; note = 2'-O-methyladenosine-3'-phosphate
  modified_base 12: mod_base = OTHER; note = 2'-deoxy-2'-fluoroguanosine-3'-phosphate
  modified_base 13: mod_base = OTHER; note = 2'-O-methylguanosine-3'-phosphate
  modified_base 14: mod_base = OTHER; note = 2'-deoxy-2'-fluorocytidine-3'-phosphate
  modified_base 15: mod_base = OTHER; note = 2'-O-methylcytidine-3'-phosphate
  modified_base 16: mod_base = OTHER; note = 2'-deoxy-2'-fluorouridine-3'-phosphate
  modified_base 17: mod_base = OTHER; note = 2'-O-methyladenosine-3'-phosphate
  modified_base 18: mod_base = OTHER; note = 2'-deoxy-2'-fluorouridine-3'-phosphate
  modified_base 19: mod_base = OTHER; note = 2'-O-methylguanosine-3'-phosphate
  modified_base 20: mod_base = OTHER; note = 2'-deoxythymidine-3'-phosphorothioate
  misc_feature 1..19: note = RNA
  misc_feature 20..21: note = DNA
aataaactccaggcctatgtt

SEQ ID NO: 1247 - DNA, 21 bp, synthetic construct
  source 1..21: mol_type = other DNA
  modified_base 1: mod_base = OTHER; note = 2'-deoxy-2'-fluorocytidine-3'-phosphate
  modified_base 2: mod_base = OTHER; note = adenosine-3'-phosphate
  modified_base 3: mod_base = OTHER; note = 2'-deoxy-2'-fluorouridine-3'-phosphate
  modified_base 4: mod_base = OTHER; note = adenosine-3'-phosphate
  modified_base 5: mod_base = OTHER; note = guanosine-3'-phosphate
  modified_base 6: mod_base = OTHER; note = guanosine-3'-phosphate
  modified_base 7: mod_base = OTHER; note = 2'-deoxy-2'-fluorocytidine-3'-phosphate
  modified_base 8: mod_base = OTHER; note = 2'-deoxy-2'-fluorocytidine-3'-phosphate
  modified_base 9: mod_base = OTHER; note = 2'-deoxy-2'-fluorouridine-3'-phosphate
  modified_base 10: mod_base = OTHER; note = guanosine-3'-phosphate
  modified_base 11: mod_base = OTHER; note = guanosine-3'-phosphate
  modified_base 12: mod_base = OTHER; note = adenosine-3'-phosphate
  modified_base 13: mod_base = OTHER; note = guanosine-3'-phosphate
  modified_base 14: mod_base = OTHER; note = 2'-deoxy-2'-fluorouridine-3'-phosphate
  modified_base 15: mod_base = OTHER; note = 2'-deoxy-2'-fluorouridine-3'-phosphate
  modified_base 16: mod_base = OTHER; note = 2'-deoxy-2'-fluorouridine-3'-phosphate
  modified_base 17: mod_base = OTHER; note = adenosine-3'-phosphate
  modified_base 18: mod_base = OTHER; note = 2'-deoxy-2'-fluorouridine-3'-phosphate
  modified_base 19: mod_base = OTHER; note = 2'-deoxy-2'-fluorouridine-3'-phosphate
  modified_base 20: mod_base = OTHER; note = 2'-deoxythymidine-3'-phosphorothioate
  misc_feature 1..19: note = RNA
  misc_feature 20..21: note = DNA
cataggcctggagtttatttt

SEQ ID NO: 1248 - DNA, 21 bp, synthetic construct
  source 1..21: mol_type = other DNA
  modified_base 1: mod_base = OTHER; note = adenosine-3'-phosphate
  modified_base 2: mod_base = OTHER; note = adenosine-3'-phosphate
  modified_base 3: mod_base = OTHER; note = 2'-deoxy-2'-fluorouridine-3'-phosphate
  modified_base 4: mod_base = OTHER; note = adenosine-3'-phosphate
  modified_base 5: mod_base = OTHER; note = adenosine-3'-phosphate
  modified_base 6: mod_base = OTHER; note = adenosine-3'-phosphate
  modified_base 7: mod_base = OTHER; note = 2'-deoxy-2'-fluorocytidine-3'-phosphate
  modified_base 8: mod_base = OTHER; note = 2'-deoxy-2'-fluorouridine-3'-phosphate
  modified_base 9: mod_base = OTHER; note = 2'-deoxy-2'-fluorocytidine-3'-phosphate
  modified_base 10: mod_base = OTHER; note = 2'-deoxy-2'-fluorocytidine-3'-phosphate
  modified_base 11: mod_base = OTHER; note = adenosine-3'-phosphate
  modified_base 12: mod_base = OTHER; note = guanosine-3'-phosphate
  modified_base 13: mod_base = OTHER; note = guanosine-3'-phosphate
  modified_base 14: mod_base = OTHER; note = 2'-deoxy-2'-fluorocytidine-3'-phosphate
  modified_base 15: mod_base = OTHER; note = 2'-deoxy-2'-fluorocytidine-3'-phosphate
  modified_base 16: mod_base = OTHER; note = 2'-deoxy-2'-fluorouridine-3'-phosphate
  modified_base 17: mod_base = OTHER; note = adenosine-3'-phosphate
  modified_base 18: mod_base = OTHER; note = 2'-deoxy-2'-fluorouridine-3'-phosphate
  modified_base 19: mod_base = OTHER; note = guanosine-3'-phosphate
  modified_base 20: mod_base = OTHER; note = 2'-deoxythymidine-3'-phosphorothioate
  misc_feature 1..19: note = RNA
  misc_feature 20..21: note = DNA
aataaactccaggcctatgtt

SEQ ID NO: 1249 - DNA, 21 bp, synthetic construct
  source 1..21: mol_type = other DNA
  modified_base 1: mod_base = OTHER; note = cytidine-3'-phosphate
  modified_base 2: mod_base = OTHER; note = 2'-O-methyladenosine-3'-phosphate
  modified_base 3: mod_base = OTHER; note = uridine-3'-phosphate
  modified_base 4: mod_base = OTHER; note = 2'-O-methyladenosine-3'-phosphate
  modified_base 5: mod_base = OTHER; note = guanosine-3'-phosphate
  modified_base 6: mod_base = OTHER; note = 2'-O-methylguanosine-3'-phosphate
  modified_base 7: mod_base = OTHER; note = cytidine-3'-phosphate
  modified_base 8: mod_base = OTHER; note = 2'-O-methylcytidine-3'-phosphate
  modified_base 9: mod_base = OTHER; note = uridine-3'-phosphate
  modified_base 10: mod_base = OTHER; note = 2'-O-methylguanosine-3'-phosphate
  modified_base 11: mod_base = OTHER; note = guanosine-3'-phosphate
  modified_base 12: mod_base = OTHER; note = 2'-O-methyladenosine-3'-phosphate
  modified_base 13: mod_base = OTHER; note = guanosine-3'-phosphate
  modified_base 14: mod_base = OTHER; note = 2'-O-methyluridine-3'-phosphate
  modified_base 15: mod_base = OTHER; note = uridine-3'-phosphate
  modified_base 16: mod_base = OTHER; note = 2'-O-methyluridine-3'-phosphate
  modified_base 17: mod_base = OTHER; note = adenosine-3'-phosphate
  modified_base 18: mod_base = OTHER; note = 2'-O-methyluridine-3'-phosphate
  modified_base 19: mod_base = OTHER; note = uridine-3'-phosphate
  modified_base 20: mod_base = OTHER; note = 2'-deoxythymidine-3'-phosphorothioate
  misc_feature 1..19: note = RNA
  misc_feature 20..21: note = DNA
cataggcctggagtttatttt

SEQ ID NO: 1250 - DNA, 21 bp, synthetic construct
  source 1..21: mol_type = other DNA
  modified_base 1: mod_base = OTHER; note = 2'-O-methyladenosine-3'-phosphate 5'phosphate
  modified_base 2: mod_base = OTHER; note = 2'-deoxy-2'-fluoroadenosine-3'-phosphate
  modified_base 3: mod_base = OTHER; note = 2'-O-methyluridine-3'-phosphate
  modified_base 4: mod_base = OTHER; note = 2'-deoxy-2'-fluoroadenosine-3'-phosphate
  modified_base 5: mod_base = OTHER; note = 2'-O-methyladenosine-3'-phosphate
  modified_base 6: mod_base = OTHER; note = 2'-deoxy-2'-fluoroadenosine-3'-phosphate
  modified_base 7: mod_base = OTHER; note = 2'-O-methylcytidine-3'-phosphate
  modified_base 8: mod_base = OTHER; note = 2'-deoxy-2'-fluorouridine-3'-phosphate
  modified_base 9: mod_base = OTHER; note = 2'-O-methylcytidine-3'-phosphate
  modified_base 10: mod_base = OTHER; note = 2'-deoxy-2'-fluorocytidine-3'-phosphate
  modified_base 11: mod_base = OTHER; note = 2'-O-methyladenosine-3'-phosphate
  modified_base 12: mod_base = OTHER; note = 2'-deoxy-2'-fluoroguanosine-3'-phosphate
  modified_base 13: mod_base = OTHER; note = 2'-O-methylguanosine-3'-phosphate
  modified_base 14: mod_base = OTHER; note = 2'-deoxy-2'-fluorocytidine-3'-phosphate
  modified_base 15: mod_base = OTHER; note = 2'-O-methylcytidine-3'-phosphate
  modified_base 16: mod_base = OTHER; note = 2'-deoxy-2'-fluorouridine-3'-phosphate
  modified_base 17: mod_base = OTHER; note = 2'-O-methyladenosine-3'-phosphate
  modified_base 18: mod_base = OTHER; note = 2'-deoxy-2'-fluorouridine-3'-phosphate
  modified_base 19: mod_base = OTHER; note = 2'-O-methylguanosine-3'-phosphate
  modified_base 20: mod_base = OTHER; note = 2'-deoxythymidine-3'-phosphorothioate
  misc_feature 1..19: note = RNA
  misc_feature 20..21: note = DNA
aataaactccaggcctatgtt

SEQ ID NO: 1251 - DNA, 21 bp, synthetic construct
  source 1..21: mol_type = other DNA
  modified_base 1: mod_base = OTHER; note = cytidine-3'-phosphate
  modified_base 2: mod_base = OTHER; note = 2'-O-methyladenosine-3'-phosphate
  modified_base 3: mod_base = OTHER; note = uridine-3'-phosphate
  modified_base 4: mod_base = OTHER; note = 2'-O-methyladenosine-3'-phosphate
  modified_base 5: mod_base = OTHER; note = guanosine-3'-phosphate
  modified_base 6: mod_base = OTHER; note = 2'-O-methylguanosine-3'-phosphate
  modified_base 7: mod_base = OTHER; note = cytidine-3'-phosphate
  modified_base 8: mod_base = OTHER; note = 2'-O-methylcytidine-3'-phosphate
  modified_base 9: mod_base = OTHER; note = uridine-3'-phosphate
  modified_base 10: mod_base = OTHER; note = 2'-O-methylguanosine-3'-phosphate
  modified_base 11: mod_base = OTHER; note = guanosine-3'-phosphate
  modified_base 12: mod_base = OTHER; note = 2'-O-methyladenosine-3'-phosphate
  modified_base 13: mod_base = OTHER; note = guanosine-3'-phosphate
  modified_base 14: mod_base = OTHER; note = 2'-O-methyluridine-3'-phosphate
  modified_base 15: mod_base = OTHER; note = uridine-3'-phosphate
  modified_base 16: mod_base = OTHER; note = 2'-O-methyluridine-3'-phosphate
  modified_base 17: mod_base = OTHER; note = adenosine-3'-phosphate
  modified_base 18: mod_base = OTHER; note = 2'-O-methyluridine-3'-phosphate
  modified_base 19: mod_base = OTHER; note = uridine-3'-phosphate
  modified_base 20: mod_base = OTHER; note = 2'-deoxythymidine-3'-phosphorothioate
  misc_feature 1..19: note = RNA
  misc_feature 20..21: note = DNA
cataggcctggagtttatttt

SEQ ID NO: 1252 - DNA, 21 bp, synthetic construct
  source 1..21: mol_type = other DNA
  modified_base 1: mod_base = OTHER; note = adenosine-3'-phosphate
  modified_base 2: mod_base = OTHER; note = adenosine-3'-phosphate
  modified_base 3: mod_base = OTHER; note = 2'-deoxy-2'-fluorouridine-3'-phosphate
  modified_base 4: mod_base = OTHER; note = adenosine-3'-phosphate
  modified_base 5: mod_base = OTHER; note = adenosine-3'-phosphate
  modified_base 6: mod_base = OTHER; note = adenosine-3'-phosphate
  modified_base 7: mod_base = OTHER; note = 2'-deoxy-2'-fluorocytidine-3'-phosphate
  modified_base 8: mod_base = OTHER; note = 2'-deoxy-2'-fluorouridine-3'-phosphate
  modified_base 9: mod_base = OTHER; note = 2'-deoxy-2'-fluorocytidine-3'-phosphate
  modified_base 10: mod_base = OTHER; note = 2'-deoxy-2'-fluorocytidine-3'-phosphate
  modified_base 11: mod_base = OTHER; note = adenosine-3'-phosphate
  modified_base 12: mod_base = OTHER; note = guanosine-3'-phosphate
  modified_base 13: mod_base = OTHER; note = guanosine-3'-phosphate
  modified_base 14: mod_base = OTHER; note = 2'-deoxy-2'-fluorocytidine-3'-phosphate
  modified_base 15: mod_base = OTHER; note = 2'-deoxy-2'-fluorocytidine-3'-phosphate
  modified_base 16: mod_base = OTHER; note = 2'-deoxy-2'-fluorouridine-3'-phosphate
  modified_base 17: mod_base = OTHER; note = adenosine-3'-phosphate
  modified_base 18: mod_base = OTHER; note = 2'-deoxy-2'-fluorouridine-3'-phosphate
  modified_base 19: mod_base = OTHER; note = guanosine-3'-phosphate
  modified_base 20: mod_base = OTHER; note = 2'-deoxythymidine-3'-phosphorothioate
  misc_feature 1..19: note = RNA
  misc_feature 20..21: note = DNA
aataaactccaggcctatgtt

SEQ ID NO: 1253 - DNA, 21 bp, synthetic construct
  source 1..21: mol_type = other DNA
  modified_base 1: mod_base = OTHER; note = 2'-deoxy-2'-fluorocytidine-3'-phosphate
  modified_base 2: mod_base = OTHER; note = 2'-O-methyladenosine-3'-phosphate
  modified_base 3: mod_base = OTHER; note = 2'-deoxy-2'-fluorouridine-3'-phosphate
  modified_base 4: mod_base = OTHER; note = 2'-O-methyladenosine-3'-phosphate
  modified_base 5: mod_base = OTHER; note = 2'-deoxy-2'-fluoroguanosine-3'-phosphate
  modified_base 6: mod_base = OTHER; note = 2'-O-methylguanosine-3'-phosphate
  modified_base 7: mod_base = OTHER; note = 2'-deoxy-2'-fluorocytidine-3'-phosphate
  modified_base 8: mod_base = OTHER; note = 2'-O-methylcytidine-3'-phosphate
  modified_base 9: mod_base = OTHER; note = 2'-deoxy-2'-fluorouridine-3'-phosphate
  modified_base 10: mod_base = OTHER; note = 2'-O-methylguanosine-3'-phosphate
  modified_base 11: mod_base = OTHER; note = 2'-deoxy-2'-fluoroguanosine-3'-phosphate
  modified_base 12: mod_base = OTHER; note = 2'-O-methyladenosine-3'-phosphate
  modified_base 13: mod_base = OTHER; note = 2'-deoxy-2'-fluoroguanosine-3'-phosphate
  modified_base 14: mod_base = OTHER; note = 2'-O-methyluridine-3'-phosphate
  modified_base 15: mod_base = OTHER; note = 2'-deoxy-2'-fluorouridine-3'-phosphate
  modified_base 16: mod_base = OTHER; note = 2'-O-methyluridine-3'-phosphate
  modified_base 17: mod_base = OTHER; note = 2'-deoxy-2'-fluoroadenosine-3'-phosphate
  modified_base 18: mod_base = OTHER; note = 2'-O-methyluridine-3'-phosphate
  modified_base 19: mod_base = OTHER; note = 2'-deoxy-2'-fluorouridine-3'-phosphate
  modified_base 20: mod_base = OTHER; note = 2'-deoxythymidine-3'-phosphorothioate
  misc_feature 1..19: note = RNA
  misc_feature 20..21: note = DNA
cataggcctggagtttatttt

SEQ ID NO: 1254 - DNA, 21 bp, synthetic construct
  source 1..21: mol_type = other DNA
  modified_base 1: mod_base = OTHER; note = adenosine-3'-phosphate
  modified_base 2: mod_base = OTHER; note = adenosine-3'-phosphate
  modified_base 3: mod_base = OTHER; note = uridine-3'-phosphate
  modified_base 4: mod_base = OTHER; note = adenosine-3'-phosphate
  modified_base 5: mod_base = OTHER; note = adenosine-3'-phosphate
  modified_base 6: mod_base = OTHER; note = 2'-O-methyladenosine-3'-phosphate
  modified_base 7: mod_base = OTHER; note = 2'-O-methylcytidine-3'-phosphate
  modified_base 8: mod_base = OTHER; note = uridine-3'-phosphate
  modified_base 9: mod_base = OTHER; note = cytidine-3'-phosphate
  modified_base 10: mod_base = OTHER; note = 2'-O-methylcytidine-3'-phosphate
  modified_base 11: mod_base = OTHER; note = 2'-O-methyladenosine-3'-phosphate
  modified_base 12: mod_base = OTHER; note = guanosine-3'-phosphate
  modified_base 13: mod_base = OTHER; note = guanosine-3'-phosphate
  modified_base 14: mod_base = OTHER; note = cytidine-3'-phosphate
  modified_base 15: mod_base = OTHER; note = cytidine-3'-phosphate
  modified_base 16: mod_base = OTHER; note = uridine-3'-phosphate
  modified_base 17: mod_base = OTHER; note = 2'-O-methyladenosine-3'-phosphate
  modified_base 18: mod_base = OTHER; note = 2'-O-methyluridine-3'-phosphate
  modified_base 19: mod_base = OTHER; note = 2'-O-methylguanosine-3'-phosphate
  modified_base 20: mod_base = OTHER; note = 2'-deoxythymidine-3'-phosphorothioate
  misc_feature 1..19: note = RNA
  misc_feature 20..21: note = DNA
aataaactccaggcctatgtt

SEQ ID NO: 1255 - DNA, 21 bp, synthetic construct
  source 1..21: mol_type = other DNA
  modified_base 1: mod_base = OTHER; note = 2'-deoxy-2'-fluorocytidine-3'-phosphate
  modified_base 2: mod_base = OTHER; note = adenosine-3'-phosphate
  modified_base 3: mod_base = OTHER; note = 2'-deoxy-2'-fluorouridine-3'-phosphate
  modified_base 4: mod_base = OTHER; note = adenosine-3'-phosphate
  modified_base 5: mod_base = OTHER; note = guanosine-3'-phosphate
  modified_base 6: mod_base = OTHER; note = guanosine-3'-phosphate
  modified_base 7: mod_base = OTHER; note = 2'-deoxy-2'-fluorocytidine-3'-phosphate
  modified_base 8: mod_base = OTHER; note = 2'-deoxy-2'-fluorocytidine-3'-phosphate
  modified_base 9: mod_base = OTHER; note = 2'-deoxy-2'-fluorouridine-3'-phosphate
  modified_base 10: mod_base = OTHER; note = guanosine-3'-phosphate
  modified_base 11: mod_base = OTHER; note = guanosine-3'-phosphate
  modified_base 12: mod_base = OTHER; note = adenosine-3'-phosphate
  modified_base 13: mod_base = OTHER; note = guanosine-3'-phosphate
  modified_base 14: mod_base = OTHER; note = 2'-deoxy-2'-fluorouridine-3'-phosphate
  modified_base 15: mod_base = OTHER; note = 2'-deoxy-2'-fluorouridine-3'-phosphate
  modified_base 16: mod_base = OTHER; note = 2'-deoxy-2'-fluorouridine-3'-phosphate
  modified_base 17: mod_base = OTHER; note = adenosine-3'-phosphate
  modified_base 18: mod_base = OTHER; note = 2'-deoxy-2'-fluorouridine-3'-phosphate
  modified_base 19: mod_base = OTHER; note = 2'-deoxy-2'-fluorouridine-3'-phosphate
  modified_base 20: mod_base = OTHER; note = 2'-deoxythymidine-3'-phosphorothioate
  misc_feature 1..19: note = RNA
  misc_feature 20..21: note = DNA
cataggcctggagtttatttt

SEQ ID NO: 1256 - DNA, 21 bp, synthetic construct
  source 1..21: mol_type = other DNA
  modified_base 1: mod_base = OTHER; note = adenosine-3'-phosphate
  modified_base 2: mod_base = OTHER; note = adenosine-3'-phosphate
  modified_base 3: mod_base = OTHER; note = uridine-3'-phosphate
  modified_base 4: mod_base = OTHER; note = adenosine-3'-phosphate
  modified_base 5: mod_base = OTHER; note = adenosine-3'-phosphate
  modified_base 6: mod_base = OTHER; note = 2'-O-methyladenosine-3'-phosphate
  modified_base 7: mod_base = OTHER; note = 2'-O-methylcytidine-3'-phosphate
  modified_base 8: mod_base = OTHER; note = uridine-3'-phosphate
  modified_base 9: mod_base = OTHER; note = cytidine-3'-phosphate
  modified_base 10: mod_base = OTHER; note = 2'-O-methylcytidine-3'-phosphate
  modified_base 11: mod_base = OTHER; note = 2'-O-methyladenosine-3'-phosphate
  modified_base 12: mod_base = OTHER; note = guanosine-3'-phosphate
  modified_base 13: mod_base = OTHER; note = guanosine-3'-phosphate
  modified_base 14: mod_base = OTHER; note = cytidine-3'-phosphate
  modified_base 15: mod_base = OTHER; note = cytidine-3'-phosphate
  modified_base 16: mod_base = OTHER; note = uridine-3'-phosphate
  modified_base 17: mod_base = OTHER; note = 2'-O-methyladenosine-3'-phosphate
  modified_base 18: mod_base = OTHER; note = 2'-O-methyluridine-3'-phosphate
  modified_base 19: mod_base = OTHER; note = 2'-O-methylguanosine-3'-phosphate
  modified_base 20: mod_base = OTHER; note = 2'-deoxythymidine-3'-phosphorothioate
  misc_feature 1..19: note = RNA
  misc_feature 20..21: note = DNA
aataaactccaggcctatgtt

SEQ ID NO: 1257 - DNA, 21 bp, synthetic construct
  source 1..21: mol_type = other DNA
  modified_base 1: mod_base = OTHER; note = cytidine-3'-phosphate
  modified_base 2: mod_base = OTHER; note = 2'-O-methyladenosine-3'-phosphate
  modified_base 3: mod_base = OTHER; note = uridine-3'-phosphate
  modified_base 4: mod_base = OTHER; note = 2'-O-methyladenosine-3'-phosphate
  modified_base 5: mod_base = OTHER; note = guanosine-3'-phosphate
  modified_base 6: mod_base = OTHER; note = 2'-O-methylguanosine-3'-phosphate
  modified_base 7: mod_base = OTHER; note = cytidine-3'-phosphate
  modified_base 8: mod_base = OTHER; note = 2'-O-methylcytidine-3'-phosphate
  modified_base 9: mod_base = OTHER; note = uridine-3'-phosphate
  modified_base 10: mod_base = OTHER; note = 2'-O-methylguanosine-3'-phosphate
  modified_base 11: mod_base = OTHER; note = guanosine-3'-phosphate
  modified_base 12: mod_base = OTHER; note = 2'-O-methyladenosine-3'-phosphate
  modified_base 13: mod_base = OTHER; note = guanosine-3'-phosphate
  modified_base 14: mod_base = OTHER; note = 2'-O-methyluridine-3'-phosphate
  modified_base 15: mod_base = OTHER; note = uridine-3'-phosphate
  modified_base 16: mod_base = OTHER; note = 2'-O-methyluridine-3'-phosphate
  modified_base 17: mod_base = OTHER; note = adenosine-3'-phosphate
  modified_base 18: mod_base = OTHER; note = 2'-O-methyluridine-3'-phosphate
  modified_base 19: mod_base = OTHER; note = uridine-3'-phosphate
  modified_base 20: mod_base = OTHER; note = 2'-deoxythymidine-3'-phosphorothioate
  misc_feature 1..19: note = RNA
  misc_feature 20..21: note = DNA
cataggcctggagtttatttt

SEQ ID NO: 1258 - DNA, 21 bp, synthetic construct
  source 1..21: mol_type = other DNA
  modified_base 1: mod_base = OTHER; note = adenosine-3'-phosphate
  modified_base 2: mod_base = OTHER; note = adenosine-3'-phosphate
  modified_base 3: mod_base = OTHER; note = uridine-3'-phosphate
  modified_base 4: mod_base = OTHER; note = adenosine-3'-phosphate
  modified_base 5: mod_base = OTHER; note = adenosine-3'-phosphate
  modified_base 6: mod_base = OTHER; note = 2'-O-methyladenosine-3'-phosphate
  modified_base 7: mod_base = OTHER; note = 2'-O-methylcytidine-3'-phosphate
  modified_base 8: mod_base = OTHER; note = uridine-3'-phosphate
  modified_base 9: mod_base = OTHER; note = cytidine-3'-phosphate
  modified_base 10: mod_base = OTHER; note = 2'-O-methylcytidine-3'-phosphate
  modified_base 11: mod_base = OTHER; note = 2'-O-methyladenosine-3'-phosphate
  modified_base 12: mod_base = OTHER; note = guanosine-3'-phosphate
  modified_base 13: mod_base = OTHER; note = guanosine-3'-phosphate
  modified_base 14: mod_base = OTHER; note = cytidine-3'-phosphate
  modified_base 15: mod_base = OTHER; note = cytidine-3'-phosphate
  modified_base 16: mod_base = OTHER; note = uridine-3'-phosphate
  modified_base 17: mod_base = OTHER; note = 2'-O-methyladenosine-3'-phosphate
  modified_base 18: mod_base = OTHER; note = 2'-O-methyluridine-3'-phosphate
  modified_base 19: mod_base = OTHER; note = 2'-O-methylguanosine-3'-phosphate
  modified_base 20: mod_base = OTHER; note = 2'-deoxythymidine-3'-phosphorothioate
  misc_feature 1..19: note = RNA
  misc_feature 20..21: note = DNA
aataaactccaggcctatgtt

SEQ ID NO: 1259 - DNA, 21 bp, synthetic construct
  source 1..21: mol_type = other DNA
  modified_base 1: mod_base = OTHER; note = uridine-3'-phosphate
  modified_base 2: mod_base = OTHER; note = cytidine-3'-phosphate
  modified_base 3: mod_base = OTHER; note = uridine-3'-phosphate
  modified_base 4: mod_base = OTHER; note = adenosine-3'-phosphate
  modified_base 5: mod_base = OTHER; note = guanosine-3'-phosphate
  modified_base 6: mod_base = OTHER; note = adenosine-3'-phosphate
  modified_base 7: mod_base = OTHER; note = cytidine-3'-phosphate
  modified_base 8: mod_base = OTHER; note = cytidine-3'-phosphate
  modified_base 9: mod_base = OTHER; note = uridine-3'-phosphate
  modified_base 10: mod_base = OTHER; note = guanosine-3'-phosphate
  modified_base 11: mod_base = OTHER; note = uridine-3'-phosphate
  modified_base 12: mod_base = OTHER; note = uridine-3'-phosphate
  modified_base 13: mod_base = OTHER; note = uridine-3'-phosphate
  modified_base 14: mod_base = OTHER; note = uridine-3'-phosphate
  modified_base 15: mod_base = OTHER; note = guanosine-3'-phosphate
  modified_base 16: mod_base = OTHER; note = cytidine-3'-phosphate
  modified_base 17: mod_base = OTHER; note = uridine-3'-phosphate
  modified_base 18: mod_base = OTHER; note = uridine-3'-phosphate
  modified_base 19: mod_base = OTHER; note = uridine-3'-phosphate
  modified_base 20: mod_base = OTHER; note = 2'-deoxythymidine-3'-phosphorothioate
  misc_feature 1..19: note = RNA
  misc_feature 20..21: note = DNA
tctagacctgttttgcttttt

SEQ ID NO: 1260 - DNA, 21 bp, synthetic construct
  source 1..21: mol_type = other DNA
  modified_base 1: mod_base = OTHER; note = adenosine-3'-phosphate
  modified_base 2: mod_base = OTHER; note = adenosine-3'-phosphate
  modified_base 3: mod_base = OTHER; note = adenosine-3'-phosphate
  modified_base 4: mod_base = OTHER; note = guanosine-3'-phosphate
  modified_base 5: mod_base = OTHER; note = cytidine-3'-phosphate
  modified_base 6: mod_base = OTHER; note = adenosine-3'-phosphate
  modified_base 7: mod_base = OTHER; note = adenosine-3'-phosphate
  modified_base 8: mod_base = OTHER; note = adenosine-3'-phosphate
  modified_base 9: mod_base = OTHER; note = adenosine-3'-phosphate
  modified_base 10: mod_base = OTHER; note = cytidine-3'-phosphate
  modified_base 11: mod_base = OTHER; note = adenosine-3'-phosphate
  modified_base 12: mod_base = OTHER; note = guanosine-3'-phosphate
  modified_base 13: mod_base = OTHER; note = guanosine-3'-phosphate
  modified_base 14: mod_base = OTHER; note = uridine-3'-phosphate
  modified_base 15: mod_base = OTHER; note = cytidine-3'-phosphate
  modified_base 16: mod_base = OTHER; note = uridine-3'-phosphate
  modified_base 17: mod_base = OTHER; note = adenosine-3'-phosphate
  modified_base 18: mod_base = OTHER; note = guanosine-3'-phosphate
  modified_base 19: mod_base = OTHER; note = adenosine-3'-phosphate
  modified_base 20: mod_base = OTHER; note = 2'-deoxythymidine-3'-phosphorothioate
  misc_feature 1..19: note = RNA
  misc_feature 20..21: note = DNA
aaagcaaaacaggtctagatt

SEQ ID NO: 1261 - DNA, 21 bp, synthetic construct
  source 1..21: mol_type = other DNA
  modified_base 1: mod_base = OTHER; note = 2'-O-methyluridine-3'-phosphate
  modified_base 2: mod_base = OTHER; note = 2'-O-methylcytidine-3'-phosphate
  modified_base 3: mod_base = OTHER; note = 2'-O-methyluridine-3'-phosphate
  modified_base 4: mod_base = OTHER; note = adenosine-3'-phosphate
  modified_base 5: mod_base = OTHER; note = guanosine-3'-phosphate
  modified_base 6: mod_base = OTHER; note = adenosine-3'-phosphate
  modified_base 7: mod_base = OTHER; note = 2'-O-methylcytidine-3'-phosphate
  modified_base 8: mod_base = OTHER; note = 2'-O-methylcytidine-3'-phosphate
  modified_base 9: mod_base = OTHER; note = 2'-O-methyluridine-3'-phosphate
  modified_base 10: mod_base = OTHER; note = guanosine-3'-phosphate
  modified_base 11: mod_base = OTHER; note = 2'-O-methyluridine-3'-phosphate
  modified_base 12: mod_base = OTHER; note = 2'-O-methyluridine-3'-phosphate
  modified_base 13: mod_base = OTHER; note = 2'-O-methyluridine-3'-phosphate
  modified_base 14: mod_base = OTHER; note = 2'-O-methyluridine-3'-phosphate
  modified_base 15: mod_base = OTHER; note = guanosine-3'-phosphate
  modified_base 16: mod_base = OTHER; note = 2'-O-methylcytidine-3'-phosphate
  modified_base 17: mod_base = OTHER; note = 2'-O-methyluridine-3'-phosphate
  modified_base 18: mod_base = OTHER; note = 2'-O-methyluridine-3'-phosphate
  modified_base 19: mod_base = OTHER; note = 2'-O-methyluridine-3'-phosphate
  modified_base 20: mod_base = OTHER; note = 2'-deoxythymidine-3'-phosphorothioate
  misc_feature 1..19: note = RNA
  misc_feature 20..21: note = DNA
tctagacctgttttgcttttt

SEQ ID NO: 1262 - DNA, 21 bp, synthetic construct
  source 1..21: mol_type = other DNA
  modified_base 1: mod_base = OTHER; note = adenosine-3'-phosphate
  modified_base 2: mod_base = OTHER; note = adenosine-3'-phosphate
  modified_base 3: mod_base = OTHER; note = adenosine-3'-phosphate
  modified_base 4: mod_base = OTHER; note = guanosine-3'-phosphate
  modified_base 5: mod_base = OTHER; note = 2'-O-methylcytidine-3'-phosphate
  modified_base 6: mod_base = OTHER; note = adenosine-3'-phosphate
  modified_base 7: mod_base = OTHER; note = adenosine-3'-phosphate
  modified_base 8: mod_base = OTHER; note = adenosine-3'-phosphate
  modified_base 9: mod_base = OTHER; note = adenosine-3'-phosphate
  modified_base 10: mod_base = OTHER; note = 2'-O-methylcytidine-3'-phosphate
  modified_base 11: mod_base = OTHER; note = adenosine-3'-phosphate
  modified_base 12: mod_base = OTHER; note = guanosine-3'-phosphate
  modified_base 13: mod_base = OTHER; note = guanosine-3'-phosphate
  modified_base 14: mod_base = OTHER; note = uridine-3'-phosphate
  modified_base 15: mod_base = OTHER; note = cytidine-3'-phosphate
  modified_base 16: mod_base = OTHER; note = 2'-O-methyluridine-3'-phosphate
  modified_base 17: mod_base = OTHER; note = adenosine-3'-phosphate
  modified_base 18: mod_base = OTHER; note = guanosine-3'-phosphate
  modified_base 19: mod_base = OTHER; note = adenosine-3'-phosphate
  modified_base 20: mod_base = OTHER; note = 2'-deoxythymidine-3'-phosphorothioate
  misc_feature 1..19: note = RNA
  misc_feature 20..21: note = DNA
aaagcaaaacaggtctagatt

SEQ ID NO: 1263 - DNA, 21 bp, synthetic construct
  source 1..21: mol_type = other DNA
  modified_base 1: mod_base = OTHER; note = 2'-deoxy-2'-fluorouridine-3'-phosphate
  modified_base 2: mod_base = OTHER; note = 2'-O-methylcytidine-3'-phosphate
  modified_base 3: mod_base = OTHER; note = 2'-deoxy-2'-fluorouridine-3'-phosphate
  modified_base 4: mod_base = OTHER; note = 2'-O-methyladenosine-3'-phosphate
  modified_base 5: mod_base = OTHER; note = 2'-deoxy-2'-fluoroguanosine-3'-phosphate
  modified_base 6: mod_base = OTHER; note = 2'-O-methyladenosine-3'-phosphate
  modified_base 7: mod_base = OTHER; note = 2'-deoxy-2'-fluorocytidine-3'-phosphate
  modified_base 8: mod_base = OTHER; note = 2'-O-methylcytidine-3'-phosphate
  modified_base 9: mod_base = OTHER; note = 2'-deoxy-2'-fluorouridine-3'-phosphate
  modified_base 10: mod_base = OTHER; note = 2'-O-methylguanosine-3'-phosphate
  modified_base 11: mod_base = OTHER; note = 2'-deoxy-2'-fluorouridine-3'-phosphate
  modified_base 12: mod_base = OTHER; note = 2'-O-methyluridine-3'-phosphate
  modified_base 13: mod_base = OTHER; note = 2'-deoxy-2'-fluorouridine-3'-phosphate
  modified_base 14: mod_base = OTHER; note = 2'-O-methyluridine-3'-phosphate
  modified_base 15: mod_base = OTHER; note = 2'-deoxy-2'-fluoroguanosine-3'-phosphate
  modified_base 16: mod_base = OTHER; note = 2'-O-methylcytidine-3'-phosphate
  modified_base 17: mod_base = OTHER; note = 2'-deoxy-2'-fluorouridine-3'-phosphate
  modified_base 18: mod_base = OTHER; note = 2'-O-methyluridine-3'-phosphate
  modified_base 19: mod_base = OTHER; note = 2'-deoxy-2'-fluorouridine-3'-phosphate
  modified_base 20: mod_base = OTHER; note = 2'-deoxythymidine-3'-phosphorothioate
  misc_feature 1..19: note = RNA
  misc_feature 20..21: note = DNA
tctagacctgttttgcttttt

SEQ ID NO: 1264 - DNA, 21 bp, synthetic construct
  source 1..21: mol_type = other DNA
  modified_base 1: mod_base = OTHER; note = 2'-O-methyladenosine-3'-phosphate 5'phosphate
  modified_base 2: mod_base = OTHER; note = 2'-deoxy-2'-fluoroadenosine-3'-phosphate
  modified_base 3: mod_base = OTHER; note = 2'-O-methyladenosine-3'-phosphate
  modified_base 4: mod_base = OTHER; note = 2'-deoxy-2'-fluoroguanosine-3'-phosphate
  modified_base 5: mod_base = OTHER; note = 2'-O-methylcytidine-3'-phosphate
  modified_base 6: mod_base = OTHER; note = 2'-deoxy-2'-fluoroadenosine-3'-phosphate
  modified_base 7: mod_base = OTHER; note = 2'-O-methyladenosine-3'-phosphate
  modified_base 8: mod_base = OTHER; note = 2'-deoxy-2'-fluoroadenosine-3'-phosphate
  modified_base 9: mod_base = OTHER; note = 2'-O-methyladenosine-3'-phosphate
  modified_base 10: mod_base = OTHER; note = 2'-deoxy-2'-fluorocytidine-3'-phosphate
  modified_base 11: mod_base = OTHER; note = 2'-O-methyladenosine-3'-phosphate
  modified_base 12: mod_base = OTHER; note = 2'-deoxy-2'-fluoroguanosine-3'-phosphate
  modified_base 13: mod_base = OTHER; note = 2'-O-methylguanosine-3'-phosphate
  modified_base 14: mod_base = OTHER; note = 2'-deoxy-2'-fluorouridine-3'-phosphate
  modified_base 15: mod_base = OTHER; note = 2'-O-methylcytidine-3'-phosphate
  modified_base 16: mod_base = OTHER; note = 2'-deoxy-2'-fluorouridine-3'-phosphate
  modified_base 17: mod_base = OTHER; note = 2'-O-methyladenosine-3'-phosphate
  modified_base 18: mod_base = OTHER; note = 2'-deoxy-2'-fluoroguanosine-3'-phosphate
  modified_base 19: mod_base = OTHER; note = 2'-O-methyladenosine-3'-phosphate
  modified_base 20: mod_base = OTHER; note = 2'-deoxythymidine-3'-phosphorothioate
  misc_feature 1..19: note = RNA
  misc_feature 20..21: note = DNA
aaagcaaaacaggtctagatt

SEQ ID NO: 1265 - DNA, 21 bp, synthetic construct
  source 1..21: mol_type = other DNA
  modified_base 1: mod_base = OTHER; note = 2'-deoxy-2'-fluorouridine-3'-phosphate
  modified_base 2: mod_base = OTHER; note = 2'-deoxy-2'-fluorocytidine-3'-phosphate
  modified_base 3: mod_base = OTHER; note = 2'-deoxy-2'-fluorouridine-3'-phosphate
  modified_base 4: mod_base = OTHER; note = adenosine-3'-phosphate
  modified_base 5: mod_base = OTHER; note = guanosine-3'-phosphate
  modified_base 6: mod_base = OTHER; note = adenosine-3'-phosphate
  modified_base 7: mod_base = OTHER; note = 2'-deoxy-2'-fluorocytidine-3'-phosphate
  modified_base 8: mod_base = OTHER; note = 2'-deoxy-2'-fluorocytidine-3'-phosphate
  modified_base 9: mod_base = OTHER; note = 2'-deoxy-2'-fluorouridine-3'-phosphate
  modified_base 10: mod_base = OTHER; note = guanosine-3'-phosphate
  modified_base 11: mod_base = OTHER; note = 2'-deoxy-2'-fluorouridine-3'-phosphate
  modified_base 12: mod_base = OTHER; note = 2'-deoxy-2'-fluorouridine-3'-phosphate
  modified_base 13: mod_base = OTHER; note = 2'-deoxy-2'-fluorouridine-3'-phosphate
  modified_base 14: mod_base = OTHER; note = 2'-deoxy-2'-fluorouridine-3'-phosphate
  modified_base 15: mod_base = OTHER; note = guanosine-3'-phosphate
  modified_base 16: mod_base = OTHER; note = 2'-deoxy-2'-fluorocytidine-3'-phosphate
  modified_base 17: mod_base = OTHER; note = 2'-deoxy-2'-fluorouridine-3'-phosphate
  modified_base 18: mod_base = OTHER; note = 2'-deoxy-2'-fluorouridine-3'-phosphate
  modified_base 19: mod_base = OTHER; note = 2'-deoxy-2'-fluorouridine-3'-phosphate
  modified_base 20: mod_base = OTHER; note = 2'-deoxythymidine-3'-phosphorothioate
  misc_feature 1..19: note = RNA
  misc_feature 20..21: note = DNA
tctagacctgttttgcttttt

SEQ ID NO: 1266 - DNA, 21 bp, synthetic construct
  source 1..21: mol_type = other DNA
  modified_base 1: mod_base = OTHER; note = adenosine-3'-phosphate
  modified_base 2: mod_base = OTHER; note = adenosine-3'-phosphate
  modified_base 3: mod_base = OTHER; note = adenosine-3'-phosphate
  modified_base 4: mod_base = OTHER; note = guanosine-3'-phosphate
  modified_base 5: mod_base = OTHER; note = 2'-deoxy-2'-fluorocytidine-3'-phosphate
  modified_base 6: mod_base = OTHER; note = adenosine-3'-phosphate
  modified_base 7: mod_base = OTHER; note = adenosine-3'-phosphate
  modified_base 8: mod_base = OTHER; note = adenosine-3'-phosphate
  modified_base 9: mod_base = OTHER; note = adenosine-3'-phosphate
  modified_base 10: mod_base = OTHER; note = 2'-deoxy-2'-fluorocytidine-3'-phosphate
  modified_base 11: mod_base = OTHER; note = adenosine-3'-phosphate
  modified_base 12: mod_base = OTHER; note = guanosine-3'-phosphate
  modified_base 13: mod_base = OTHER; note = guanosine-3'-phosphate
  modified_base 14: mod_base = OTHER; note = 2'-deoxy-2'-fluorouridine-3'-phosphate
  modified_base 15: mod_base = OTHER; note = 2'-deoxy-2'-fluorocytidine-3'-phosphate
  modified_base 16: mod_base = OTHER; note = 2'-deoxy-2'-fluorouridine-3'-phosphate
  modified_base 17: mod_base = OTHER; note = adenosine-3'-phosphate
  modified_base 18: mod_base = OTHER; note = guanosine-3'-phosphate
  modified_base 19: mod_base = OTHER; note = adenosine-3'-phosphate
  modified_base 20: mod_base = OTHER; note = 2'-deoxythymidine-3'-phosphorothioate
  misc_feature 1..19: note = RNA
  misc_feature 20..21: note = DNA
aaagcaaaacaggtctagatt

SEQ ID NO: 1267 - DNA, 21 bp, synthetic construct
  source 1..21: mol_type = other DNA
  modified_base 1: mod_base = OTHER; note = uridine-3'-phosphate
  modified_base 2: mod_base = OTHER; note = 2'-O-methylcytidine-3'-phosphate
  modified_base 3: mod_base = OTHER; note = uridine-3'-phosphate
  modified_base 4: mod_base = OTHER; note = 2'-O-methyladenosine-3'-phosphate
  modified_base 5: mod_base = OTHER; note = guanosine-3'-phosphate
  modified_base 6: mod_base = OTHER; note = 2'-O-methyladenosine-3'-phosphate
  modified_base 7: mod_base = OTHER; note = cytidine-3'-phosphate
  modified_base 8: mod_base = OTHER; note = 2'-O-methylcytidine-3'-phosphate
  modified_base 9: mod_base = OTHER; note = uridine-3'-phosphate
  modified_base 10: mod_base = OTHER; note = 2'-O-methylguanosine-3'-phosphate
  modified_base 11: mod_base = OTHER; note = uridine-3'-phosphate
  modified_base 12: mod_base = OTHER; note = 2'-O-methyluridine-3'-phosphate
  modified_base 13: mod_base = OTHER; note = uridine-3'-phosphate
  modified_base 14: mod_base = OTHER; note = 2'-O-methyluridine-3'-phosphate
  modified_base 15: mod_base = OTHER; note = guanosine-3'-phosphate
  modified_base 16: mod_base = OTHER; note = 2'-O-methylcytidine-3'-phosphate
  modified_base 17: mod_base = OTHER; note = uridine-3'-phosphate
  modified_base 18: mod_base = OTHER; note = 2'-O-methyluridine-3'-phosphate
  modified_base 19: mod_base = OTHER; note = uridine-3'-phosphate
  modified_base 20: mod_base = OTHER; note = 2'-deoxythymidine-3'-phosphorothioate
  misc_feature 1..19: note = RNA
  misc_feature 20..21: note = DNA
tctagacctgttttgcttttt

SEQ ID NO: 1268 - DNA, 21 bp, synthetic construct
  source 1..21: mol_type = other DNA
  modified_base 1: mod_base = OTHER; note = 2'-O-methyladenosine-3'-phosphate 5'phosphate
  modified_base 2: mod_base = OTHER; note = 2'-deoxy-2'-fluoroadenosine-3'-phosphate
  modified_base 3: mod_base = OTHER; note = 2'-O-methyladenosine-3'-phosphate
  modified_base 4: mod_base = OTHER; note = 2'-deoxy-2'-fluoroguanosine-3'-phosphate
  modified_base 5: mod_base = OTHER; note = 2'-O-methylcytidine-3'-phosphate
  modified_base 6: mod_base = OTHER; note = 2'-deoxy-2'-fluoroadenosine-3'-phosphate
  modified_base 7: mod_base = OTHER; note = 2'-O-methyladenosine-3'-phosphate
  modified_base 8: mod_base = OTHER; note = 2'-deoxy-2'-fluoroadenosine-3'-phosphate
  modified_base 9: mod_base = OTHER; note = 2'-O-methyladenosine-3'-phosphate
  modified_base 10: mod_base = OTHER; note = 2'-deoxy-2'-fluorocytidine-3'-phosphate
  modified_base 11: mod_base = OTHER; note = 2'-O-methyladenosine-3'-phosphate
  modified_base 12: mod_base = OTHER; note = 2'-deoxy-2'-fluoroguanosine-3'-phosphate
  modified_base 13: mod_base = OTHER; note = 2'-O-methylguanosine-3'-phosphate
  modified_base 14: mod_base = OTHER; note = 2'-deoxy-2'-fluorouridine-3'-phosphate
  modified_base 15: mod_base = OTHER; note = 2'-O-methylcytidine-3'-phosphate
  modified_base 16: mod_base = OTHER; note = 2'-deoxy-2'-fluorouridine-3'-phosphate
  modified_base 17: mod_base = OTHER; note = 2'-O-methyladenosine-3'-phosphate
  modified_base 18: mod_base = OTHER; note = 2'-deoxy-2'-fluoroguanosine-3'-phosphate
  modified_base 19: mod_base = OTHER; note = 2'-O-methyladenosine-3'-phosphate
  modified_base 20: mod_base = OTHER; note = 2'-deoxythymidine-3'-phosphorothioate
  misc_feature 1..19: note = RNA
  misc_feature 20..21: note = DNA
aaagcaaaacaggtctagatt

SEQ ID NO: 1269 - DNA, 21 bp, synthetic construct
  source 1..21: mol_type = other DNA
  modified_base 1: mod_base = OTHER; note = uridine-3'-phosphate
  modified_base 2: mod_base = OTHER; note = 2'-O-methylcytidine-3'-phosphate
  modified_base 3: mod_base = OTHER; note = uridine-3'-phosphate
  modified_base 4: mod_base = OTHER; note = 2'-O-methyladenosine-3'-phosphate
  modified_base 5: mod_base = OTHER; note = guanosine-3'-phosphate
  modified_base 6: mod_base = OTHER; note = 2'-O-methyladenosine-3'-phosphate
  modified_base 7: mod_base = OTHER; note = cytidine-3'-phosphate
  modified_base 8: mod_base = OTHER; note = 2'-O-methylcytidine-3'-phosphate
  modified_base 9: mod_base = OTHER; note = uridine-3'-phosphate
  modified_base 10: mod_base = OTHER; note = 2'-O-methylguanosine-3'-phosphate
  modified_base 11: mod_base = OTHER; note = uridine-3'-phosphate
  modified_base 12: mod_base = OTHER; note = 2'-O-methyluridine-3'-phosphate
  modified_base 13: mod_base = OTHER; note = uridine-3'-phosphate
  modified_base 14: mod_base = OTHER; note = 2'-O-methyluridine-3'-phosphate
  modified_base 15: mod_base = OTHER; note = guanosine-3'-phosphate
  modified_base 16: mod_base = OTHER; note = 2'-O-methylcytidine-3'-phosphate
  modified_base 17: mod_base = OTHER; note = uridine-3'-phosphate
  modified_base 18: mod_base = OTHER; note = 2'-O-methyluridine-3'-phosphate
  modified_base 19: mod_base = OTHER; note = uridine-3'-phosphate
  modified_base 20: mod_base = OTHER; note = 2'-deoxythymidine-3'-phosphorothioate
  misc_feature 1..19: note = RNA
  misc_feature 20..21: note = DNA
tctagacctgttttgcttttt

SEQ ID NO: 1270 - DNA, 21 bp, synthetic construct
  source 1..21: mol_type = other DNA
  modified_base 1: mod_base = OTHER; note = adenosine-3'-phosphate
  modified_base 2: mod_base = OTHER; note = adenosine-3'-phosphate
  modified_base 3: mod_base = OTHER; note = adenosine-3'-phosphate
  modified_base 4: mod_base = OTHER; note = guanosine-3'-phosphate
  modified_base 5: mod_base = OTHER; note = 2'-deoxy-2'-fluorocytidine-3'-phosphate
  modified_base 6: mod_base = OTHER; note = adenosine-3'-phosphate
  modified_base 7: mod_base = OTHER; note = adenosine-3'-phosphate
  modified_base 8: mod_base = OTHER; note = adenosine-3'-phosphate
  modified_base 9: mod_base = OTHER; note = adenosine-3'-phosphate
  modified_base 10: mod_base = OTHER; note = 2'-deoxy-2'-fluorocytidine-3'-phosphate
  modified_base 11: mod_base = OTHER; note = adenosine-3'-phosphate
  modified_base 12: mod_base = OTHER; note = guanosine-3'-phosphate
  modified_base 13: mod_base = OTHER; note = guanosine-3'-phosphate
  modified_base 14: mod_base = OTHER; note = 2'-deoxy-2'-fluorouridine-3'-phosphate
  modified_base 15: mod_base = OTHER; note = 2'-deoxy-2'-fluorocytidine-3'-phosphate
  modified_base 16: mod_base = OTHER; note = 2'-deoxy-2'-fluorouridine-3'-phosphate
  modified_base 17: mod_base = OTHER; note = adenosine-3'-phosphate
  modified_base 18: mod_base = OTHER; note = guanosine-3'-phosphate
  modified_base 19: mod_base = OTHER; note = adenosine-3'-phosphate
  modified_base 20: mod_base = OTHER; note = 2'-deoxythymidine-3'-phosphorothioate
  misc_feature 1..19: note = RNA
  misc_feature 20..21: note = DNA
aaagcaaaacaggtctagatt

SEQ ID NO: 1271 - DNA, 21 bp, synthetic construct
  source 1..21: mol_type = other DNA
  modified_base 1: mod_base = OTHER; note = 2'-deoxy-2'-fluorouridine-3'-phosphate
  modified_base 2: mod_base = OTHER; note = 2'-O-methylcytidine-3'-phosphate
  modified_base 3: mod_base = OTHER; note = 2'-deoxy-2'-fluorouridine-3'-phosphate
  modified_base 4: mod_base = OTHER; note = 2'-O-methyladenosine-3'-phosphate
  modified_base 5: mod_base = OTHER; note = 2'-deoxy-2'-fluoroguanosine-3'-phosphate
  modified_base 6: mod_base = OTHER; note = 2'-O-methyladenosine-3'-phosphate
  modified_base 7: mod_base = OTHER; note = 2'-deoxy-2'-fluorocytidine-3'-phosphate
  modified_base 8: mod_base = OTHER; note = 2'-O-methylcytidine-3'-phosphate
  modified_base 9: mod_base = OTHER; note = 2'-deoxy-2'-fluorouridine-3'-phosphate
  modified_base 10: mod_base = OTHER; note = 2'-O-methylguanosine-3'-phosphate
  modified_base 11: mod_base = OTHER; note = 2'-deoxy-2'-fluorouridine-3'-phosphate
  modified_base 12: mod_base = OTHER; note = 2'-O-methyluridine-3'-phosphate
  modified_base 13: mod_base = OTHER; note = 2'-deoxy-2'-fluorouridine-3'-phosphate
  modified_base 14: mod_base = OTHER; note = 2'-O-methyluridine-3'-phosphate
  modified_base 15: mod_base = OTHER; note = 2'-deoxy-2'-fluoroguanosine-3'-phosphate
  modified_base 16: mod_base = OTHER; note = 2'-O-methylcytidine-3'-phosphate
  modified_base 17: mod_base = OTHER; note = 2'-deoxy-2'-fluorouridine-3'-phosphate
  modified_base 18: mod_base = OTHER; note = 2'-O-methyluridine-3'-phosphate
  modified_base 19: mod_base = OTHER; note = 2'-deoxy-2'-fluorouridine-3'-phosphate
  modified_base 20: mod_base = OTHER; note = 2'-deoxythymidine-3'-phosphorothioate
  misc_feature 1..19: note = RNA
  misc_feature 20..21: note = DNA
tctagacctgttttgcttttt

SEQ ID NO: 1272 - DNA, 21 bp, synthetic construct
  source 1..21: mol_type = other DNA
  modified_base 1: mod_base = OTHER; note = adenosine-3'-phosphate
  modified_base 2: mod_base = OTHER; note = adenosine-3'-phosphate
  modified_base 3: mod_base = OTHER; note = adenosine-3'-phosphate
  modified_base 4: mod_base = OTHER; note = guanosine-3'-phosphate
  modified_base 5: mod_base = OTHER; note = cytidine-3'-phosphate
  modified_base 6: mod_base = OTHER; note = 2'-O-methyladenosine-3'-phosphate
  modified_base 7: mod_base = OTHER; note = 2'-O-methyladenosine-3'-phosphate
  modified_base 8: mod_base = OTHER; note = adenosine-3'-phosphate
  modified_base 9: mod_base = OTHER; note = adenosine-3'-phosphate
  modified_base 10: mod_base = OTHER; note = 2'-O-methylcytidine-3'-phosphate
  modified_base 11: mod_base = OTHER; note = 2'-O-methyladenosine-3'-phosphate
  modified_base 12: mod_base = OTHER; note = guanosine-3'-phosphate
  modified_base 13: mod_base = OTHER; note = guanosine-3'-phosphate
  modified_base 14: mod_base = OTHER; note = uridine-3'-phosphate
  modified_base 15: mod_base = OTHER; note = cytidine-3'-phosphate
  modified_base 16: mod_base = OTHER; note = uridine-3'-phosphate
  modified_base 17: mod_base = OTHER; note = 2'-O-methyladenosine-3'-phosphate
  modified_base 18: mod_base = OTHER; note = 2'-O-methylguanosine-3'-phosphate
  modified_base 19: mod_base = OTHER; note = 2'-O-methyladenosine-3'-phosphate
  modified_base 20: mod_base = OTHER; note = 2'-deoxythymidine-3'-phosphorothioate
  misc_feature 1..19: note = RNA
  misc_feature 20..21: note = DNA
aaagcaaaacaggtctagatt

SEQ ID NO: 1273 - DNA, 21 bp, synthetic construct
  source 1..21: mol_type = other DNA
  modified_base 1: mod_base = OTHER; note = 2'-deoxy-2'-fluorouridine-3'-phosphate
  modified_base 2: mod_base = OTHER; note = 2'-deoxy-2'-fluorocytidine-3'-phosphate
  modified_base 3: mod_base = OTHER; note = 2'-deoxy-2'-fluorouridine-3'-phosphate
  modified_base 4: mod_base = OTHER; note = adenosine-3'-phosphate
  modified_base 5: mod_base = OTHER; note = guanosine-3'-phosphate
  modified_base 6: mod_base = OTHER; note = adenosine-3'-phosphate
  modified_base 7: mod_base = OTHER; note = 2'-deoxy-2'-fluorocytidine-3'-phosphate
  modified_base 8: mod_base = OTHER; note = 2'-deoxy-2'-fluorocytidine-3'-phosphate
  modified_base 9: mod_base = OTHER; note = 2'-deoxy-2'-fluorouridine-3'-phosphate
  modified_base 10: mod_base = OTHER; note = guanosine-3'-phosphate
  modified_base 11: mod_base = OTHER; note = 2'-deoxy-2'-fluorouridine-3'-phosphate
  modified_base 12: mod_base = OTHER; note = 2'-deoxy-2'-fluorouridine-3'-phosphate
  modified_base 13: mod_base = OTHER; note = 2'-deoxy-2'-fluorouridine-3'-phosphate
  modified_base 14: mod_base = OTHER; note = 2'-deoxy-2'-fluorouridine-3'-phosphate
  modified_base 15: mod_base = OTHER; note = guanosine-3'-phosphate
  modified_base 16: mod_base = OTHER; note = 2'-deoxy-2'-fluorocytidine-3'-phosphate
  modified_base 17: mod_base = OTHER; note = 2'-deoxy-2'-fluorouridine-3'-phosphate
  modified_base 18: mod_base = OTHER; note = 2'-deoxy-2'-fluorouridine-3'-phosphate
  modified_base 19: mod_base = OTHER; note = 2'-deoxy-2'-fluorouridine-3'-phosphate
  modified_base 20: mod_base = OTHER; note = 2'-deoxythymidine-3'-phosphorothioate
  misc_feature 1..19: note = RNA
  misc_feature 20..21: note = DNA
tctagacctgttttgcttttt

SEQ ID NO: 1274 - DNA, 21 bp, synthetic construct
  source 1..21: mol_type = other DNA
  modified_base 1: mod_base = OTHER; note = adenosine-3'-phosphate
  modified_base 2: mod_base = OTHER; note = adenosine-3'-phosphate
  modified_base 3: mod_base = OTHER; note = adenosine-3'-phosphate
  modified_base 4: mod_base = OTHER; note = guanosine-3'-phosphate
  modified_base 5: mod_base = OTHER; note = cytidine-3'-phosphate
  modified_base 6: mod_base = OTHER; note = 2'-O-methyladenosine-3'-phosphate
  modified_base 7: mod_base = OTHER; note = 2'-O-methyladenosine-3'-phosphate
  modified_base 8: mod_base = OTHER; note = adenosine-3'-phosphate
  modified_base 9: mod_base = OTHER; note = adenosine-3'-phosphate
  modified_base 10: mod_base = OTHER; note = 2'-O-methylcytidine-3'-phosphate
  modified_base 11: mod_base = OTHER; note = 2'-O-methyladenosine-3'-phosphate
  modified_base 12: mod_base = OTHER; note = guanosine-3'-phosphate
  modified_base 13: mod_base = OTHER; note = guanosine-3'-phosphate
  modified_base 14: mod_base = OTHER; note = uridine-3'-phosphate
  modified_base 15: mod_base = OTHER; note = cytidine-3'-phosphate
  modified_base 16: mod_base = OTHER; note = uridine-3'-phosphate
  modified_base 17: mod_base = OTHER; note = 2'-O-methyladenosine-3'-phosphate
  modified_base 18: mod_base = OTHER; note = 2'-O-methylguanosine-3'-phosphate
  modified_base 19: mod_base = OTHER; note = 2'-O-methyladenosine-3'-phosphate
  modified_base 20: mod_base = OTHER; note = 2'-deoxythymidine-3'-phosphorothioate
  misc_feature 1..19: note = RNA
  misc_feature 20..21: note = DNA
aaagcaaaacaggtctagatt

SEQ ID NO: 1275 - DNA, 21 bp, synthetic construct
  source 1..21: mol_type = other DNA
  modified_base 1: mod_base = OTHER; note = uridine-3'-phosphate
  modified_base 2: mod_base = OTHER; note = 2'-O-methylcytidine-3'-phosphate
  modified_base 3: mod_base = OTHER; note = uridine-3'-phosphate
  modified_base 4: mod_base = OTHER; note = 2'-O-methyladenosine-3'-phosphate
  modified_base 5: mod_base = OTHER; note = guanosine-3'-phosphate
  modified_base 6: mod_base = OTHER; note = 2'-O-methyladenosine-3'-phosphate
  modified_base 7: mod_base = OTHER; note = cytidine-3'-phosphate
  modified_base 8: mod_base = OTHER; note = 2'-O-methylcytidine-3'-phosphate
  modified_base 9: mod_base = OTHER; note = uridine-3'-phosphate
  modified_base 10: mod_base = OTHER; note = 2'-O-methylguanosine-3'-phosphate
  modified_base 11: mod_base = OTHER; note = uridine-3'-phosphate
  modified_base 12: mod_base = OTHER; note = 2'-O-methyluridine-3'-phosphate
  modified_base 13: mod_base = OTHER; note = uridine-3'-phosphate
  modified_base 14: mod_base = OTHER; note = 2'-O-methyluridine-3'-phosphate
  modified_base 15: mod_base = OTHER; note = guanosine-3'-phosphate
  modified_base 16: mod_base = OTHER; note = 2'-O-methylcytidine-3'-phosphate
  modified_base 17: mod_base = OTHER; note = uridine-3'-phosphate
  modified_base 18: mod_base = OTHER; note = 2'-O-methyluridine-3'-phosphate
  modified_base 19: mod_base = OTHER; note = uridine-3'-phosphate
  modified_base 20: mod_base = OTHER; note = 2'-deoxythymidine-3'-phosphorothioate
  misc_feature 1..19: note = RNA
  misc_feature 20..21: note = DNA
tctagacctgttttgcttttt

SEQ ID NO: 1276 - DNA, 21 bp, synthetic construct
  source 1..21: mol_type = other DNA
  modified_base 1: mod_base = OTHER; note = adenosine-3'-phosphate
  modified_base 2: mod_base = OTHER; note = adenosine-3'-phosphate
  modified_base 3: mod_base = OTHER; note = adenosine-3'-phosphate
  modified_base 4: mod_base = OTHER; note = guanosine-3'-phosphate
  modified_base 5: mod_base = OTHER; note = cytidine-3'-phosphate
  modified_base 6: mod_base = OTHER; note = 2'-O-methyladenosine-3'-phosphate
  modified_base 7: mod_base = OTHER; note = 2'-O-methyladenosine-3'-phosphate
  modified_base 8: mod_base = OTHER; note = adenosine-3'-phosphate
  modified_base 9: mod_base = OTHER; note = adenosine-3'-phosphate
  modified_base 10: mod_base = OTHER; note = 2'-O-methylcytidine-3'-phosphate
  modified_base 11: mod_base = OTHER; note = 2'-O-methyladenosine-3'-phosphate
  modified_base 12: mod_base = OTHER; note = guanosine-3'-phosphate
  modified_base 13: mod_base = OTHER; note = guanosine-3'-phosphate
  modified_base 14: mod_base = OTHER; note = uridine-3'-phosphate
  modified_base 15: mod_base = OTHER; note = cytidine-3'-phosphate
  modified_base 16: mod_base = OTHER; note = uridine-3'-phosphate
  modified_base 17: mod_base = OTHER; note = 2'-O-methyladenosine-3'-phosphate
  modified_base 18: mod_base = OTHER; note = 2'-O-methylguanosine-3'-phosphate
  modified_base 19: mod_base = OTHER; note = 2'-O-methyladenosine-3'-phosphate
  modified_base 20: mod_base = OTHER; note = 2'-deoxythymidine-3'-phosphorothioate
  misc_feature 1..19: note = RNA
  misc_feature 20..21: note = DNA
aaagcaaaacaggtctagatt

SEQ ID NO: 1277 - DNA, 21 bp, synthetic construct
  source 1..21: mol_type = other DNA
  modified_base 1: mod_base = OTHER; note = 2'-deoxy-2'-fluorouridine-3'-phosphate
  modified_base 2: mod_base = OTHER; note = 2'-O-methylcytidine-3'-phosphate
  modified_base 3: mod_base = OTHER; note = 2'-deoxy-2'-fluoroadenosine-3'-phosphate
  modified_base 4: mod_base = OTHER; note = 2'-O-methyluridine-3'-phosphate
  modified_base 5: mod_base = OTHER; note = 2'-deoxy-2'-fluoroadenosine-3'-phosphate
  modified_base 6: mod_base = OTHER; note = 2'-O-methylguanosine-3'-phosphate
  modified_base 7: mod_base = OTHER; note = 2'-deoxy-2'-fluoroguanosine-3'-phosphate
  modified_base 8: mod_base = OTHER; note = 2'-O-methylcytidine-3'-phosphate
  modified_base 9: mod_base = OTHER; note = 2'-deoxy-2'-fluorocytidine-3'-phosphate
  modified_base 10: mod_base = OTHER; note = 2'-O-methyluridine-3'-phosphate
  modified_base 11: mod_base = OTHER; note = 2'-deoxy-2'-fluoroguanosine-3'-phosphate
  modified_base 12: mod_base = OTHER; note = 2'-O-methylguanosine-3'-phosphate
  modified_base 13: mod_base = OTHER; note = 2'-deoxy-2'-fluoroadenosine-3'-phosphate
  modified_base 14: mod_base = OTHER; note = 2'-O-methylguanosine-3'-phosphate
  modified_base 15: mod_base = OTHER; note = 2'-deoxy-2'-fluorouridine-3'-phosphate
  modified_base 16: mod_base = OTHER; note = 2'-O-methyluridine-3'-phosphate
  modified_base 17: mod_base = OTHER; note = 2'-deoxy-2'-fluorouridine-3'-phosphate
  modified_base 18: mod_base = OTHER; note = 2'-O-methyladenosine-3'-phosphate
  modified_base 19: mod_base = OTHER; note = 2'-deoxy-2'-fluorouridine-3'-phosphate
  modified_base 20: mod_base = OTHER; note = 2'-deoxythymidine-3'-phosphorothioate
  misc_feature 1..19: note = RNA
  misc_feature 20..21: note = DNA
tcataggcctggagtttattt

SEQ ID NO: 1278 - DNA, 21 bp, synthetic construct
  source 1..21: mol_type = other DNA
  modified_base 1: mod_base = OTHER; note = 2'-O-methyladenosine-3'-phosphate 5'phosphate
  modified_base 2: mod_base = OTHER; note = 2'-deoxy-2'-fluorouridine-3'-phosphate
  modified_base 3: mod_base = OTHER; note = 2'-O-methyladenosine-3'-phosphate
  modified_base 4: mod_base = OTHER; note = 2'-deoxy-2'-fluoroadenosine-3'-phosphate
  modified_base 5: mod_base = OTHER; note = 2'-O-methyladenosine-3'-phosphate
  modified_base 6: mod_base = OTHER; note = 2'-deoxy-2'-fluorocytidine-3'-phosphate
  modified_base 7: mod_base = OTHER; note = 2'-O-methyluridine-3'-phosphate
  modified_base 8: mod_base = OTHER; note = 2'-deoxy-2'-fluorocytidine-3'-phosphate
  modified_base 9: mod_base = OTHER; note = 2'-O-methylcytidine-3'-phosphate
  modified_base 10: mod_base = OTHER; note = 2'-deoxy-2'-fluoroadenosine-3'-phosphate
  modified_base 11: mod_base = OTHER; note = 2'-O-methylguanosine-3'-phosphate
  modified_base 12: mod_base = OTHER; note = 2'-deoxy-2'-fluoroguanosine-3'-phosphate
  modified_base 13: mod_base = OTHER; note = 2'-O-methylcytidine-3'-phosphate
  modified_base 14: mod_base = OTHER; note = 2'-deoxy-2'-fluorocytidine-3'-phosphate
  modified_base 15: mod_base = OTHER; note = 2'-O-methyluridine-3'-phosphate
  modified_base 16: mod_base = OTHER; note = 2'-deoxy-2'-fluoroadenosine-3'-phosphate
  modified_base 17: mod_base = OTHER; note = 2'-O-methyluridine-3'-phosphate
  modified_base 18: mod_base = OTHER; note = 2'-deoxy-2'-fluoroguanosine-3'-phosphate
  modified_base 19: mod_base = OTHER; note = 2'-O-methyladenosine-3'-phosphate
  modified_base 20: mod_base = OTHER; note = 2'-deoxythymidine-3'-phosphorothioate
  misc_feature 1..19: note = RNA
  misc_feature 20..21: note = DNA
ataaactccaggcctatgatt

SEQ ID NO: 1279 - DNA, 21 bp, synthetic construct
  source 1..21: mol_type = other DNA
  modified_base 1: mod_base = OTHER; note = 2'-deoxy-2'-fluorouridine-3'-phosphate
  modified_base 2: mod_base = OTHER; note = 2'-deoxy-2'-fluorocytidine-3'-phosphate
  modified_base 3: mod_base = OTHER; note = adenosine-3'-phosphate
  modified_base 4: mod_base = OTHER; note = 2'-deoxy-2'-fluorouridine-3'-phosphate
  modified_base 5: mod_base = OTHER; note = adenosine-3'-phosphate
  modified_base 6: mod_base = OTHER; note = guanosine-3'-phosphate
  modified_base 7: mod_base = OTHER; note = guanosine-3'-phosphate
  modified_base 8: mod_base = OTHER; note = 2'-deoxy-2'-fluorocytidine-3'-phosphate
  modified_base 9: mod_base = OTHER; note = 2'-deoxy-2'-fluorocytidine-3'-phosphate
  modified_base 10: mod_base = OTHER; note = 2'-deoxy-2'-fluorouridine-3'-phosphate
  modified_base 11: mod_base = OTHER; note = guanosine-3'-phosphate
  modified_base 12: mod_base = OTHER; note = guanosine-3'-phosphate
  modified_base 13: mod_base = OTHER; note = adenosine-3'-phosphate
  modified_base 14: mod_base = OTHER; note = guanosine-3'-phosphate
  modified_base 15: mod_base = OTHER; note = 2'-deoxy-2'-fluorouridine-3'-phosphate
  modified_base 16: mod_base = OTHER; note = 2'-deoxy-2'-fluorouridine-3'-phosphate
  modified_base 17: mod_base = OTHER; note = 2'-deoxy-2'-fluorouridine-3'-phosphate
  modified_base 18: mod_base = OTHER; note = adenosine-3'-phosphate
  modified_base 19: mod_base = OTHER; note = 2'-deoxy-2'-fluorouridine-3'-phosphate
  modified_base 20: mod_base = OTHER; note = 2'-deoxythymidine-3'-phosphorothioate
  misc_feature 1..19: note = RNA
  misc_feature 20..21: note = DNA
tcataggcctggagtttattt

SEQ ID NO: 1280 - DNA, 21 bp, synthetic construct
  source 1..21: mol_type = other DNA
  modified_base 1: mod_base = OTHER; note = adenosine-3'-phosphate
  modified_base 2: mod_base = OTHER; note = 2'-deoxy-2'-fluorouridine-3'-phosphate
  modified_base 3: mod_base = OTHER; note = adenosine-3'-phosphate
  modified_base 4: mod_base = OTHER; note = adenosine-3'-phosphate
  modified_base 5: mod_base = OTHER; note = adenosine-3'-phosphate
  modified_base 6: mod_base = OTHER; note = 2'-deoxy-2'-fluorocytidine-3'-phosphate
  modified_base 7: mod_base = OTHER; note = 2'-deoxy-2'-fluorouridine-3'-phosphate
  modified_base 8: mod_base = OTHER; note = 2'-deoxy-2'-fluorocytidine-3'-phosphate
  modified_base 9: mod_base = OTHER; note = 2'-deoxy-2'-fluorocytidine-3'-phosphate
  modified_base 10: mod_base = OTHER; note = adenosine-3'-phosphate
  modified_base 11: mod_base = OTHER; note = guanosine-3'-phosphate
  modified_base 12: mod_base = OTHER; note = guanosine-3'-phosphate
  modified_base 13: mod_base = OTHER; note = 2'-deoxy-2'-fluorocytidine-3'-phosphate
  modified_base 14: mod_base = OTHER; note = 2'-deoxy-2'-fluorocytidine-3'-phosphate
  modified_base 15: mod_base = OTHER; note = 2'-deoxy-2'-fluorouridine-3'-phosphate
  modified_base 16: mod_base = OTHER; note = adenosine-3'-phosphate
  modified_base 17: mod_base = OTHER; note = 2'-deoxy-2'-fluorouridine-3'-phosphate
  modified_base 18: mod_base = OTHER; note = guanosine-3'-phosphate
  modified_base 19: mod_base = OTHER; note = adenosine-3'-phosphate
  modified_base 20: mod_base = OTHER; note = 2'-deoxythymidine-3'-phosphorothioate
  misc_feature 1..19: note = RNA
  misc_feature 20..21: note = DNA
ataaactccaggcctatgatt

SEQ ID NO: 1281 - DNA, 21 bp, synthetic construct
  source 1..21: mol_type = other DNA
  modified_base 1: mod_base = OTHER; note = uridine-3'-phosphate
  modified_base 2: mod_base = OTHER; note = 2'-O-methylcytidine-3'-phosphate
  modified_base 3: mod_base = OTHER; note = adenosine-3'-phosphate
  modified_base 4: mod_base = OTHER; note = 2'-O-methyluridine-3'-phosphate
  modified_base 5: mod_base = OTHER; note = adenosine-3'-phosphate
  modified_base 6: mod_base = OTHER; note = 2'-O-methylguanosine-3'-phosphate
  modified_base 7: mod_base = OTHER; note = guanosine-3'-phosphate
  modified_base 8: mod_base = OTHER; note = 2'-O-methylcytidine-3'-phosphate
  modified_base 9: mod_base = OTHER; note = cytidine-3'-phosphate
  modified_base 10: mod_base = OTHER; note = 2'-O-methyluridine-3'-phosphate
  modified_base 11: mod_base = OTHER; note = guanosine-3'-phosphate
  modified_base 12: mod_base = OTHER; note = 2'-O-methylguanosine-3'-phosphate
  modified_base 13: mod_base = OTHER; note = adenosine-3'-phosphate
  modified_base 14: mod_base = OTHER; note = 2'-O-methylguanosine-3'-phosphate
  modified_base 15: mod_base = OTHER; note = uridine-3'-phosphate
  modified_base 16: mod_base = OTHER; note = 2'-O-methyluridine-3'-phosphate
  modified_base 17: mod_base = OTHER; note = uridine-3'-phosphate
  modified_base 18: mod_base = OTHER; note = 2'-O-methyladenosine-3'-phosphate
  modified_base 19: mod_base = OTHER; note = uridine-3'-phosphate
  modified_base 20: mod_base = OTHER; note = 2'-deoxythymidine-3'-phosphorothioate
  misc_feature 1..19: note = RNA
  misc_feature 20..21: note = DNA
tcataggcctggagtttattt

SEQ ID NO: 1282 - DNA, 21 bp, synthetic construct
  source 1..21: mol_type = other DNA
  modified_base 1: mod_base = OTHER; note = 2'-O-methyladenosine-3'-phosphate 5'phosphate
  modified_base 2: mod_base = OTHER; note = 2'-deoxy-2'-fluorouridine-3'-phosphate
  modified_base 3: mod_base = OTHER; note = 2'-O-methyladenosine-3'-phosphate
  modified_base 4: mod_base = OTHER; note = 2'-deoxy-2'-fluoroadenosine-3'-phosphate
  modified_base 5: mod_base = OTHER; note = 2'-O-methyladenosine-3'-phosphate
  modified_base 6: mod_base = OTHER; note = 2'-deoxy-2'-fluorocytidine-3'-phosphate
  modified_base 7: mod_base = OTHER; note = 2'-O-methyluridine-3'-phosphate
  modified_base 8: mod_base = OTHER; note = 2'-deoxy-2'-fluorocytidine-3'-phosphate
  modified_base 9: mod_base = OTHER; note = 2'-O-methylcytidine-3'-phosphate
  modified_base 10: mod_base = OTHER; note = 2'-deoxy-2'-fluoroadenosine-3'-phosphate
  modified_base 11: mod_base = OTHER; note = 2'-O-methylguanosine-3'-phosphate
  modified_base 12: mod_base = OTHER; note = 2'-deoxy-2'-fluoroguanosine-3'-phosphate
  modified_base 13: mod_base = OTHER; note = 2'-O-methylcytidine-3'-phosphate
  modified_base 14: mod_base = OTHER; note = 2'-deoxy-2'-fluorocytidine-3'-phosphate
  modified_base 15: mod_base = OTHER; note = 2'-O-methyluridine-3'-phosphate
  modified_base 16: mod_base = OTHER; note = 2'-deoxy-2'-fluoroadenosine-3'-phosphate
  modified_base 17: mod_base = OTHER; note = 2'-O-methyluridine-3'-phosphate
  modified_base 18: mod_base = OTHER; note = 2'-deoxy-2'-fluoroguanosine-3'-phosphate
  modified_base 19: mod_base = OTHER; note = 2'-O-methyladenosine-3'-phosphate
  modified_base 20: mod_base = OTHER; note = 2'-deoxythymidine-3'-phosphorothioate
  misc_feature 1..19: note = RNA
  misc_feature 20..21: note = DNA
ataaactccaggcctatgatt

SEQ ID NO: 1283 - DNA, 21 bp, synthetic construct
  source 1..21: mol_type = other DNA
  modified_base 1: mod_base = OTHER; note = uridine-3'-phosphate
  modified_base 2: mod_base = OTHER; note = 2'-O-methylcytidine-3'-phosphate
  modified_base 3: mod_base = OTHER; note = adenosine-3'-phosphate
  modified_base 4: mod_base = OTHER; note = 2'-O-methyluridine-3'-phosphate
  modified_base 5: mod_base = OTHER; note = adenosine-3'-phosphate
  modified_base 6: mod_base = OTHER; note = 2'-O-methylguanosine-3'-phosphate
  modified_base 7: mod_base = OTHER; note = guanosine-3'-phosphate
  modified_base 8: mod_base = OTHER; note = 2'-O-methylcytidine-3'-phosphate
  modified_base 9: mod_base = OTHER; note = cytidine-3'-phosphate
  modified_base 10: mod_base = OTHER; note = 2'-O-methyluridine-3'-phosphate
  modified_base 11: mod_base = OTHER; note = guanosine-3'-phosphate
  modified_base 12: mod_base = OTHER; note = 2'-O-methylguanosine-3'-phosphate
  modified_base 13: mod_base = OTHER; note = adenosine-3'-phosphate
  modified_base 14: mod_base = OTHER; note = 2'-O-methylguanosine-3'-phosphate
  modified_base 15: mod_base = OTHER; note = uridine-3'-phosphate
  modified_base 16: mod_base = OTHER; note = 2'-O-methyluridine-3'-phosphate
  modified_base 17: mod_base = OTHER; note = uridine-3'-phosphate
  modified_base 18: mod_base = OTHER; note = 2'-O-methyladenosine-3'-phosphate
  modified_base 19: mod_base = OTHER; note = uridine-3'-phosphate
  modified_base 20: mod_base = OTHER; note = 2'-deoxythymidine-3'-phosphorothioate
  misc_feature 1..19: note = RNA
  misc_feature 20..21: note = DNA
tcataggcctggagtttattt

SEQ ID NO: 1284 - DNA, 21 bp, synthetic construct
  source 1..21: mol_type = other DNA
  modified_base 1: mod_base = OTHER; note = adenosine-3'-phosphate
  modified_base 2: mod_base = OTHER; note = 2'-deoxy-2'-fluorouridine-3'-phosphate
  modified_base 3: mod_base = OTHER; note = adenosine-3'-phosphate
  modified_base 4: mod_base = OTHER; note = adenosine-3'-phosphate
  modified_base 5: mod_base = OTHER; note = adenosine-3'-phosphate
  modified_base 6: mod_base = OTHER; note = 2'-deoxy-2'-fluorocytidine-3'-phosphate
  modified_base 7: mod_base = OTHER; note = 2'-deoxy-2'-fluorouridine-3'-phosphate
  modified_base 8: mod_base = OTHER; note = 2'-deoxy-2'-fluorocytidine-3'-phosphate
  modified_base 9: mod_base = OTHER; note = 2'-deoxy-2'-fluorocytidine-3'-phosphate
  modified_base 10: mod_base = OTHER; note = adenosine-3'-phosphate
  modified_base 11: mod_base = OTHER; note = guanosine-3'-phosphate
  modified_base 12: mod_base = OTHER; note = guanosine-3'-phosphate
  modified_base 13: mod_base = OTHER; note = 2'-deoxy-2'-fluorocytidine-3'-phosphate
  modified_base 14: mod_base = OTHER; note = 2'-deoxy-2'-fluorocytidine-3'-phosphate
  modified_base 15: mod_base = OTHER; note = 2'-deoxy-2'-fluorouridine-3'-phosphate
  modified_base 16: mod_base = OTHER; note = adenosine-3'-phosphate
  modified_base 17: mod_base = OTHER; note = 2'-deoxy-2'-fluorouridine-3'-phosphate
  modified_base 18: mod_base = OTHER; note = guanosine-3'-phosphate
  modified_base 19: mod_base = OTHER; note = adenosine-3'-phosphate
  modified_base 20: mod_base = OTHER; note = 2'-deoxythymidine-3'-phosphorothioate
  misc_feature 1..19: note = RNA
  misc_feature 20..21: note = DNA
ataaactccaggcctatgatt

SEQ ID NO: 1285 - DNA, 21 bp, synthetic construct
  source 1..21: mol_type = other DNA
  modified_base 1: mod_base = OTHER; note = 2'-deoxy-2'-fluorouridine-3'-phosphate
  modified_base 2: mod_base = OTHER; note = 2'-O-methylcytidine-3'-phosphate
  modified_base 3: mod_base = OTHER; note = 2'-deoxy-2'-fluoroadenosine-3'-phosphate
  modified_base 4: mod_base = OTHER; note = 2'-O-methyluridine-3'-phosphate
  modified_base 5: mod_base = OTHER; note = 2'-deoxy-2'-fluoroadenosine-3'-phosphate
  modified_base 6: mod_base = OTHER; note = 2'-O-methylguanosine-3'-phosphate
  modified_base 7: mod_base = OTHER; note = 2'-deoxy-2'-fluoroguanosine-3'-phosphate
  modified_base 8: mod_base = OTHER; note = 2'-O-methylcytidine-3'-phosphate
  modified_base 9: mod_base = OTHER; note = 2'-deoxy-2'-fluorocytidine-3'-phosphate
  modified_base 10: mod_base = OTHER; note = 2'-O-methyluridine-3'-phosphate
  modified_base 11: mod_base = OTHER; note = 2'-deoxy-2'-fluoroguanosine-3'-phosphate
  modified_base 12: mod_base = OTHER; note = 2'-O-methylguanosine-3'-phosphate
  modified_base 13: mod_base = OTHER; note = 2'-deoxy-2'-fluoroadenosine-3'-phosphate
  modified_base 14: mod_base = OTHER; note = 2'-O-methylguanosine-3'-phosphate
  modified_base 15: mod_base = OTHER; note = 2'-deoxy-2'-fluorouridine-3'-phosphate
  modified_base 16: mod_base = OTHER; note = 2'-O-methyluridine-3'-phosphate
  modified_base 17: mod_base = OTHER; note = 2'-deoxy-2'-fluorouridine-3'-phosphate
  modified_base 18: mod_base = OTHER; note = 2'-O-methyladenosine-3'-phosphate
  modified_base 19: mod_base = OTHER; note = 2'-deoxy-2'-fluorouridine-3'-phosphate
  modified_base 20: mod_base = OTHER; note = 2'-deoxythymidine-3'-phosphorothioate
  misc_feature 1..19: note = RNA
  misc_feature 20..21: note = DNA
tcataggcctggagtttattt

SEQ ID NO: 1286 - DNA, 21 bp, synthetic construct
  source 1..21: mol_type = other DNA
  modified_base 1: mod_base = OTHER; note = adenosine-3'-phosphate
  modified_base 2: mod_base = OTHER; note = uridine-3'-phosphate
  modified_base 3: mod_base = OTHER; note = adenosine-3'-phosphate
  modified_base 4: mod_base = OTHER; note = adenosine-3'-phosphate
  modified_base 5: mod_base = OTHER; note = adenosine-3'-phosphate
  modified_base 6: mod_base = OTHER; note = 2'-O-methylcytidine-3'-phosphate
  modified_base 7: mod_base = OTHER; note = 2'-O-methyluridine-3'-phosphate
  modified_base 8: mod_base = OTHER; note = cytidine-3'-phosphate
  modified_base 9: mod_base = OTHER; note = cytidine-3'-phosphate
  modified_base 10: mod_base = OTHER; note = 2'-O-methyladenosine-3'-phosphate
  modified_base 11: mod_base = OTHER; note = 2'-O-methylguanosine-3'-phosphate
  modified_base 12: mod_base = OTHER; note = guanosine-3'-phosphate
  modified_base 13: mod_base = OTHER; note = cytidine-3'-phosphate
  modified_base 14: mod_base = OTHER; note = cytidine-3'-phosphate
  modified_base 15: mod_base = OTHER; note = uridine-3'-phosphate
  modified_base 16: mod_base = OTHER; note = adenosine-3'-phosphate
  modified_base 17: mod_base = OTHER; note = 2'-O-methyluridine-3'-phosphate
  modified_base 18: mod_base = OTHER; note = 2'-O-methylguanosine-3'-phosphate
  modified_base 19: mod_base = OTHER; note = 2'-O-methyladenosine-3'-phosphate
  modified_base 20: mod_base = OTHER; note = 2'-deoxythymidine-3'-phosphorothioate
  misc_feature 1..19: note = RNA
  misc_feature 20..21: note = DNA
ataaactccaggcctatgatt

SEQ ID NO: 1287 - DNA, 21 bp, synthetic construct
  source 1..21: mol_type = other DNA
  modified_base 1: mod_base = OTHER; note = 2'-deoxy-2'-fluorouridine-3'-phosphate
  modified_base 2: mod_base = OTHER; note = 2'-deoxy-2'-fluorocytidine-3'-phosphate
  modified_base 3: mod_base = OTHER; note = adenosine-3'-phosphate
  modified_base 4: mod_base = OTHER; note = 2'-deoxy-2'-fluorouridine-3'-phosphate
  modified_base 5: mod_base = OTHER; note = adenosine-3'-phosphate
  modified_base 6: mod_base = OTHER; note = guanosine-3'-phosphate
  modified_base 7: mod_base = OTHER; note = guanosine-3'-phosphate
  modified_base 8: mod_base = OTHER; note = 2'-deoxy-2'-fluorocytidine-3'-phosphate
  modified_base 9: mod_base = OTHER; note = 2'-deoxy-2'-fluorocytidine-3'-phosphate
  modified_base 10: mod_base = OTHER; note = 2'-deoxy-2'-fluorouridine-3'-phosphate
  modified_base 11: mod_base = OTHER; note = guanosine-3'-phosphate
  modified_base 12: mod_base = OTHER; note = guanosine-3'-phosphate
  modified_base 13: mod_base = OTHER; note = adenosine-3'-phosphate
  modified_base 14: mod_base = OTHER; note = guanosine-3'-phosphate
  modified_base 15: mod_base = OTHER; note = 2'-deoxy-2'-fluorouridine-3'-phosphate
  modified_base 16: mod_base = OTHER; note = 2'-deoxy-2'-fluorouridine-3'-phosphate
  modified_base 17: mod_base = OTHER; note = 2'-deoxy-2'-fluorouridine-3'-phosphate
  modified_base 18: mod_base = OTHER; note = adenosine-3'-phosphate
  modified_base 19: mod_base = OTHER; note = 2'-deoxy-2'-fluorouridine-3'-phosphate
  modified_base 20: mod_base = OTHER; note = 2'-deoxythymidine-3'-phosphorothioate
  misc_feature 1..19: note = RNA
  misc_feature 20..21: note = DNA
tcataggcctggagtttattt

SEQ ID NO: 1288 - DNA, 21 bp, synthetic construct
  source 1..21: mol_type = other DNA
  modified_base 1: mod_base = OTHER; note = adenosine-3'-phosphate
  modified_base 2: mod_base = OTHER; note = uridine-3'-phosphate
  modified_base 3: mod_base = OTHER; note = adenosine-3'-phosphate
  modified_base 4: mod_base = OTHER; note = adenosine-3'-phosphate
  modified_base 5: mod_base = OTHER; note = adenosine-3'-phosphate
  modified_base 6: mod_base = OTHER; note = 2'-O-methylcytidine-3'-phosphate
  modified_base 7: mod_base = OTHER; note = 2'-O-methyluridine-3'-phosphate
  modified_base 8: mod_base = OTHER; note = cytidine-3'-phosphate
  modified_base 9: mod_base = OTHER; note = cytidine-3'-phosphate
  modified_base 10: mod_base = OTHER; note = 2'-O-methyladenosine-3'-phosphate
  modified_base 11: mod_base = OTHER; note = 2'-O-methylguanosine-3'-phosphate
  modified_base 12: mod_base = OTHER; note = guanosine-3'-phosphate
  modified_base 13: mod_base = OTHER; note = cytidine-3'-phosphate
  modified_base 14: mod_base = OTHER; note = cytidine-3'-phosphate
  modified_base 15: mod_base = OTHER; note = uridine-3'-phosphate
  modified_base 16: mod_base = OTHER; note = adenosine-3'-phosphate
  modified_base 17: mod_base = OTHER; note = 2'-O-methyluridine-3'-phosphate
  modified_base 18: mod_base = OTHER; note = 2'-O-methylguanosine-3'-phosphate
  modified_base 19: mod_base = OTHER; note = 2'-O-methyladenosine-3'-phosphate
  modified_base 20: mod_base = OTHER; note = 2'-deoxythymidine-3'-phosphorothioate
  misc_feature 1..19: note = RNA
  misc_feature 20..21: note = DNA
ataaactccaggcctatgatt

SEQ ID NO: 1289 - DNA, 21 bp, synthetic construct
  source 1..21: mol_type = other DNA
  modified_base 1: mod_base = OTHER; note = uridine-3'-phosphate
  modified_base 2: mod_base = OTHER; note = 2'-O-methylcytidine-3'-phosphate
  modified_base 3: mod_base = OTHER; note = adenosine-3'-phosphate
  modified_base 4: mod_base = OTHER; note = 2'-O-methyluridine-3'-phosphate
  modified_base 5: mod_base = OTHER; note = adenosine-3'-phosphate
  modified_base 6: mod_base = OTHER; note = 2'-O-methylguanosine-3'-phosphate
  modified_base 7: mod_base = OTHER; note = guanosine-3'-phosphate
  modified_base 8: mod_base = OTHER; note = 2'-O-methylcytidine-3'-phosphate
  modified_base 9: mod_base = OTHER; note = cytidine-3'-phosphate
  modified_base 10: mod_base = OTHER; note = 2'-O-methyluridine-3'-phosphate
  modified_base 11: mod_base = OTHER; note = guanosine-3'-phosphate
  modified_base 12: mod_base = OTHER; note = 2'-O-methylguanosine-3'-phosphate
  modified_base 13: mod_base = OTHER; note = adenosine-3'-phosphate
  modified_base 14: mod_base = OTHER; note = 2'-O-methylguanosine-3'-phosphate
  modified_base 15: mod_base = OTHER; note = uridine-3'-phosphate
  modified_base 16: mod_base = OTHER; note = 2'-O-methyluridine-3'-phosphate
  modified_base 17: mod_base = OTHER; note = uridine-3'-phosphate
  modified_base 18: mod_base = OTHER; note = 2'-O-methyladenosine-3'-phosphate
  modified_base 19: mod_base = OTHER; note = uridine-3'-phosphate
  modified_base 20: mod_base = OTHER; note = 2'-deoxythymidine-3'-phosphorothioate
  misc_feature 1..19: note = RNA
  misc_feature 20..21: note = DNA
tcataggcctggagtttattt

SEQ ID NO: 1290 - DNA, 21 bp, synthetic construct
  source 1..21: mol_type = other DNA
  modified_base 1: mod_base = OTHER; note = adenosine-3'-phosphate
  modified_base 2: mod_base = OTHER; note = uridine-3'-phosphate
  modified_base 3: mod_base = OTHER; note = adenosine-3'-phosphate
  modified_base 4: mod_base = OTHER; note = adenosine-3'-phosphate
  modified_base 5: mod_base = OTHER; note = adenosine-3'-phosphate
  modified_base 6: mod_base = OTHER; note = 2'-O-methylcytidine-3'-phosphate
  modified_base 7: mod_base = OTHER; note = 2'-O-methyluridine-3'-phosphate
  modified_base 8: mod_base = OTHER; note = cytidine-3'-phosphate
  modified_base 9: mod_base = OTHER; note = cytidine-3'-phosphate
  modified_base 10: mod_base = OTHER; note = 2'-O-methyladenosine-3'-phosphate
  modified_base 11: mod_base = OTHER; note = 2'-O-methylguanosine-3'-phosphate
  modified_base 12: mod_base = OTHER; note = guanosine-3'-phosphate
  modified_base 13: mod_base = OTHER; note = cytidine-3'-phosphate
  modified_base 14: mod_base = OTHER; note = cytidine-3'-phosphate
  modified_base 15: mod_base = OTHER; note = uridine-3'-phosphate
  modified_base 16: mod_base = OTHER; note = adenosine-3'-phosphate
  modified_base 17: mod_base = OTHER; note = 2'-O-methyluridine-3'-phosphate
  modified_base 18: mod_base = OTHER; note = 2'-O-methylguanosine-3'-phosphate
  modified_base 19: mod_base = OTHER; note = 2'-O-methyladenosine-3'-phosphate
  modified_base 20: mod_base = OTHER; note = 2'-deoxythymidine-3'-phosphorothioate
  misc_feature 1..19: note = RNA
  misc_feature 20..21: note = DNA
ataaactccaggcctatgatt

SEQ ID NO: 1291 - DNA, 21 bp, synthetic construct
  source 1..21: mol_type = other DNA
  modified_base 1: mod_base = OTHER; note = uridine-3'-phosphate
  modified_base 2: mod_base = OTHER; note = guanosine-3'-phosphate
  modified_base 3: mod_base = OTHER; note = adenosine-3'-phosphate
  modified_base 4: mod_base = OTHER; note = adenosine-3'-phosphate
  modified_base 5: mod_base = OTHER; note = guanosine-3'-phosphate
  modified_base 6: mod_base = OTHER; note = adenosine-3'-phosphate
  modified_base 7: mod_base = OTHER; note = uridine-3'-phosphate
  modified_base 8: mod_base = OTHER; note = adenosine-3'-phosphate
  modified_base 9: mod_base = OTHER; note = uridine-3'-phosphate
  modified_base 10: mod_base = OTHER; note = uridine-3'-phosphate
  modified_base 11: mod_base = OTHER; note = uridine-3'-phosphate
  modified_base 12: mod_base = OTHER; note = adenosine-3'-phosphate
  modified_base 13: mod_base = OTHER; note = uridine-3'-phosphate
  modified_base 14: mod_base = OTHER; note = uridine-3'-phosphate
  modified_base 15: mod_base = OTHER; note = cytidine-3'-phosphate
  modified_base 16: mod_base = OTHER; note = uridine-3'-phosphate
  modified_base 17: mod_base = OTHER; note = guanosine-3'-phosphate
  modified_base 18: mod_base = OTHER; note = guanosine-3'-phosphate
  modified_base 19: mod_base = OTHER; note = guanosine-3'-phosphate
  modified_base 20: mod_base = OTHER; note = 2'-deoxythymidine-3'-phosphorothioate
  misc_feature 1..19: note = RNA
  misc_feature 20..21: note = DNA
tgaagatatttattctgggtt

SEQ ID NO: 1292 - DNA, 21 bp, synthetic construct
  source 1..21: mol_type = other DNA
  modified_base 1: mod_base = OTHER; note = cytidine-3'-phosphate
  modified_base 2: mod_base = OTHER; note = cytidine-3'-phosphate
  modified_base 3: mod_base = OTHER; note = cytidine-3'-phosphate
  modified_base 4: mod_base = OTHER; note = adenosine-3'-phosphate
  modified_base 5: mod_base = OTHER; note = guanosine-3'-phosphate
  modified_base 6: mod_base = OTHER; note = adenosine-3'-phosphate
  modified_base 7: mod_base = OTHER; note = adenosine-3'-phosphate
  modified_base 8: mod_base = OTHER; note = uridine-3'-phosphate
  modified_base 9: mod_base = OTHER; note = adenosine-3'-phosphate
  modified_base 10: mod_base = OTHER; note = adenosine-3'-phosphate
  modified_base 11: mod_base = OTHER; note = adenosine-3'-phosphate
  modified_base 12: mod_base = OTHER; note = uridine-3'-phosphate
  modified_base 13: mod_base = OTHER; note = adenosine-3'-phosphate
  modified_base 14: mod_base = OTHER; note = uridine-3'-phosphate
  modified_base 15: mod_base = OTHER; note = cytidine-3'-phosphate
  modified_base 16: mod_base = OTHER; note = uridine-3'-phosphate
  modified_base 17: mod_base = OTHER; note = uridine-3'-phosphate
  modified_base 18: mod_base = OTHER; note = cytidine-3'-phosphate
  modified_base 19: mod_base = OTHER; note = adenosine-3'-phosphate
  modified_base 20: mod_base = OTHER; note = 2'-deoxythymidine-3'-phosphorothioate
  misc_feature 1..19: note = RNA
  misc_feature 20..21: note = DNA
cccagaataaatatcttcatt

SEQ ID NO: 1293 - DNA, 21 bp, synthetic construct
  source 1..21: mol_type = other DNA
  modified_base 1: mod_base = OTHER; note = 2'-O-methyluridine-3'-phosphate
  modified_base 2: mod_base = OTHER; note = guanosine-3'-phosphate
  modified_base 3: mod_base = OTHER; note = adenosine-3'-phosphate
  modified_base 4: mod_base = OTHER; note = adenosine-3'-phosphate
  modified_base 5: mod_base = OTHER; note = guanosine-3'-phosphate
  modified_base 6: mod_base = OTHER; note = adenosine-3'-phosphate
  modified_base 7: mod_base = OTHER; note = 2'-O-methyluridine-3'-phosphate
  modified_base 8: mod_base = OTHER; note = adenosine-3'-phosphate
  modified_base 9: mod_base = OTHER; note = 2'-O-methyluridine-3'-phosphate
  modified_base 10: mod_base = OTHER; note = 2'-O-methyluridine-3'-phosphate
  modified_base 11: mod_base = OTHER; note = 2'-O-methyluridine-3'-phosphate
  modified_base 12: mod_base = OTHER; note = adenosine-3'-phosphate
  modified_base 13: mod_base = OTHER; note = 2'-O-methyluridine-3'-phosphate
  modified_base 14: mod_base = OTHER; note = 2'-O-methyluridine-3'-phosphate
  modified_base 15: mod_base = OTHER; note = 2'-O-methylcytidine-3'-phosphate
  modified_base 16: mod_base = OTHER; note = 2'-O-methyluridine-3'-phosphate
  modified_base 17: mod_base = OTHER; note = guanosine-3'-phosphate
  modified_base 18: mod_base = OTHER; note = guanosine-3'-phosphate
  modified_base 19: mod_base = OTHER; note = guanosine-3'-phosphate
  modified_base 20: mod_base = OTHER; note = 2'-deoxythymidine-3'-phosphorothioate
  misc_feature 1..19: note = RNA
  misc_feature 20..21: note = DNA
tgaagatatttattctgggtt

SEQ ID NO: 1294 - DNA, 21 bp, synthetic construct
  source 1..21: mol_type = other DNA
  modified_base 1: mod_base = OTHER; note = cytidine-3'-phosphate
  modified_base 2: mod_base = OTHER; note = cytidine-3'-phosphate
  modified_base 3: mod_base = OTHER; note = 2'-O-methylcytidine-3'-phosphate
  modified_base 4: mod_base = OTHER; note = adenosine-3'-phosphate
  modified_base 5: mod_base = OTHER; note = guanosine-3'-phosphate
  modified_base 6: mod_base = OTHER; note = adenosine-3'-phosphate
  modified_base 7: mod_base = OTHER; note = adenosine-3'-phosphate
  modified_base 8: mod_base = OTHER; note = 2'-O-methyluridine-3'-phosphate
  modified_base 9: mod_base = OTHER; note = adenosine-3'-phosphate
  modified_base 10: mod_base = OTHER; note = adenosine-3'-phosphate
  modified_base 11: mod_base = OTHER; note = adenosine-3'-phosphate
  modified_base 12: mod_base = OTHER; note = 2'-O-methyluridine-3'-phosphate
  modified_base 13: mod_base = OTHER; note = adenosine-3'-phosphate
  modified_base 14: mod_base = OTHER; note = uridine-3'-phosphate
  modified_base 15: mod_base = OTHER; note = cytidine-3'-phosphate
  modified_base 16: mod_base = OTHER; note = uridine-3'-phosphate
  modified_base 17: mod_base = OTHER; note = uridine-3'-phosphate
  modified_base 18: mod_base = OTHER; note = 2'-O-methylcytidine-3'-phosphate
  modified_base 19: mod_base = OTHER; note = adenosine-3'-phosphate
  modified_base 20: mod_base = OTHER; note = 2'-deoxythymidine-3'-phosphorothioate
  misc_feature 1..19: note = RNA
  misc_feature 20..21: note = DNA
cccagaataaatatcttcatt

SEQ ID NO: 1295 - DNA, 21 bp, synthetic construct
  source 1..21: mol_type = other DNA
  modified_base 1: mod_base = OTHER; note = uridine-3'-phosphate
  modified_base 2: mod_base = OTHER; note = cytidine-3'-phosphate
  modified_base 3: mod_base = OTHER; note = uridine-3'-phosphate
  modified_base 4: mod_base = OTHER; note = guanosine-3'-phosphate
  modified_base 5: mod_base = OTHER; note = guanosine-3'-phosphate
  modified_base 6: mod_base = OTHER; note = guanosine-3'-phosphate
  modified_base 7: mod_base = OTHER; note = uridine-3'-phosphate
  modified_base 8: mod_base = OTHER; note = uridine-3'-phosphate
  modified_base 9: mod_base = OTHER; note = uridine-3'-phosphate
  modified_base 10: mod_base = OTHER; note = uridine-3'-phosphate
  modified_base 11: mod_base = OTHER; note = guanosine-3'-phosphate
  modified_base 12: mod_base = OTHER; note = uridine-3'-phosphate
  modified_base 13: mod_base = OTHER; note = adenosine-3'-phosphate
  modified_base 14: mod_base = OTHER; note = guanosine-3'-phosphate
  modified_base 15: mod_base = OTHER; note = cytidine-3'-phosphate
  modified_base 16: mod_base = OTHER; note = adenosine-3'-phosphate
  modified_base 17: mod_base = OTHER; note = uridine-3'-phosphate
  modified_base 18: mod_base = OTHER; note = uridine-3'-phosphate
  modified_base 19: mod_base = OTHER; note = uridine-3'-phosphate
  modified_base 20: mod_base = OTHER; note = 2'-deoxythymidine-3'-phosphorothioate
  misc_feature 1..19: note = RNA
  misc_feature 20..21: note = DNA
tctgggttttgtagcattttt

SEQ ID NO: 1296 - DNA, 21 bp, synthetic construct
  source 1..21: mol_type = other DNA
  modified_base 1: mod_base = OTHER; note = adenosine-3'-phosphate
  modified_base 2: mod_base = OTHER; note = adenosine-3'-phosphate
  modified_base 3: mod_base = OTHER; note = adenosine-3'-phosphate
  modified_base 4: mod_base = OTHER; note = uridine-3'-phosphate
  modified_base 5: mod_base = OTHER; note = guanosine-3'-phosphate
  modified_base 6: mod_base = OTHER; note = cytidine-3'-phosphate
  modified_base 7: mod_base = OTHER; note = uridine-3'-phosphate
  modified_base 8: mod_base = OTHER; note = adenosine-3'-phosphate
  modified_base 9: mod_base = OTHER; note = cytidine-3'-phosphate
  modified_base 10: mod_base = OTHER; note = adenosine-3'-phosphate
  modified_base 11: mod_base = OTHER; note = adenosine-3'-phosphate
  modified_base 12: mod_base = OTHER; note = adenosine-3'-phosphate
  modified_base 13: mod_base = OTHER; note = adenosine-3'-phosphate
  modified_base 14: mod_base = OTHER; note = cytidine-3'-phosphate
  modified_base 15: mod_base = OTHER; note = cytidine-3'-phosphate
  modified_base 16: mod_base = OTHER; note = cytidine-3'-phosphate
  modified_base 17: mod_base = OTHER; note = adenosine-3'-phosphate
  modified_base 18: mod_base = OTHER; note = guanosine-3'-phosphate
  modified_base 19: mod_base = OTHER; note = adenosine-3'-phosphate
  modified_base 20: mod_base = OTHER; note = 2'-deoxythymidine-3'-phosphorothioate
  misc_feature 1..19: note = RNA
  misc_feature 20..21: note = DNA
aaatgctacaaaacccagatt

SEQ ID NO: 1297 - DNA, 21 bp, synthetic construct
  source 1..21: mol_type = other DNA
  modified_base 1: mod_base = OTHER; note = 2'-O-methyluridine-3'-phosphate
  modified_base 2: mod_base = OTHER; note = 2'-O-methylcytidine-3'-phosphate
  modified_base 3: mod_base = OTHER; note = 2'-O-methyluridine-3'-phosphate
  modified_base 4: mod_base = OTHER; note = guanosine-3'-phosphate
  modified_base 5: mod_base = OTHER; note = guanosine-3'-phosphate
  modified_base 6: mod_base = OTHER; note = guanosine-3'-phosphate
  modified_base 7: mod_base = OTHER; note = 2'-O-methyluridine-3'-phosphate
  modified_base 8: mod_base = OTHER; note = 2'-O-methyluridine-3'-phosphate
  modified_base 9: mod_base = OTHER; note = 2'-O-methyluridine-3'-phosphate
  modified_base 10: mod_base = OTHER; note = 2'-O-methyluridine-3'-phosphate
  modified_base 11: mod_base = OTHER; note = guanosine-3'-phosphate
  modified_base 12: mod_base = OTHER; note = 2'-O-methyluridine-3'-phosphate
  modified_base 13: mod_base = OTHER; note = adenosine-3'-phosphate
  modified_base 14: mod_base = OTHER; note = guanosine-3'-phosphate
  modified_base 15: mod_base = OTHER; note = 2'-O-methylcytidine-3'-phosphate
  modified_base 16: mod_base = OTHER; note = adenosine-3'-phosphate
  modified_base 17: mod_base = OTHER; note = 2'-O-methyluridine-3'-phosphate
  modified_base 18: mod_base = OTHER; note = 2'-O-methyluridine-3'-phosphate
  modified_base 19: mod_base = OTHER; note = 2'-O-methyluridine-3'-phosphate
  modified_base 20: mod_base = OTHER; note = 2'-deoxythymidine-3'-phosphorothioate
  misc_feature 1..19: note = RNA
  misc_feature 20..21: note = DNA
tctgggttttgtagcattttt

SEQ ID NO: 1298 - DNA, 21 bp, synthetic construct
  source 1..21: mol_type = other DNA
  modified_base 1: mod_base = OTHER; note = adenosine-3'-phosphate
  modified_base 2: mod_base = OTHER; note = adenosine-3'-phosphate
  modified_base 3: mod_base = OTHER; note = adenosine-3'-phosphate
  modified_base 4: mod_base = OTHER; note = uridine-3'-phosphate
  modified_base 5: mod_base = OTHER; note = guanosine-3'-phosphate
  modified_base 6: mod_base = OTHER; note = cytidine-3'-phosphate
  modified_base 7: mod_base = OTHER; note = 2'-O-methyluridine-3'-phosphate
  modified_base 8: mod_base = OTHER; note = adenosine-3'-phosphate
  modified_base 9: mod_base = OTHER; note = 2'-O-methylcytidine-3'-phosphate
  modified_base 10: mod_base = OTHER; note = adenosine-3'-phosphate
  modified_base 11: mod_base = OTHER; note = adenosine-3'-phosphate
  modified_base 12: mod_base = OTHER; note = adenosine-3'-phosphate
  modified_base 13: mod_base = OTHER; note = adenosine-3'-phosphate
  modified_base 14: mod_base = OTHER; note = cytidine-3'-phosphate
  modified_base 15: mod_base = OTHER; note = cytidine-3'-phosphate
  modified_base 16: mod_base = OTHER; note = 2'-O-methylcytidine-3'-phosphate
  modified_base 17: mod_base = OTHER; note = adenosine-3'-phosphate
  modified_base 18: mod_base = OTHER; note = guanosine-3'-phosphate
  modified_base 19: mod_base = OTHER; note = adenosine-3'-phosphate
  modified_base 20: mod_base = OTHER; note = 2'-deoxythymidine-3'-phosphorothioate
  misc_feature 1..19: note = RNA
  misc_feature 20..21: note = DNA
aaatgctacaaaacccagatt

SEQ ID NO: 1299 - DNA, 21 bp, synthetic construct
  source 1..21: mol_type = other DNA
  modified_base 1: mod_base = OTHER; note = adenosine-3'-phosphate
  modified_base 2: mod_base = OTHER; note = uridine-3'-phosphate
  modified_base 3: mod_base = OTHER; note = adenosine-3'-phosphate
  modified_base 4: mod_base = OTHER; note = adenosine-3'-phosphate
  modified_base 5: mod_base = OTHER; note = adenosine-3'-phosphate
  modified_base 6: mod_base = OTHER; note = adenosine-3'-phosphate
  modified_base 7: mod_base = OTHER; note = adenosine-3'-phosphate
  modified_base 8: mod_base = OTHER; note = cytidine-3'-phosphate
  modified_base 9: mod_base = OTHER; note = adenosine-3'-phosphate
  modified_base 10: mod_base = OTHER; note = adenosine-3'-phosphate
  modified_base 11: mod_base = OTHER; note = adenosine-3'-phosphate
  modified_base 12: mod_base = OTHER; note = cytidine-3'-phosphate
  modified_base 13: mod_base = OTHER; note = adenosine-3'-phosphate
  modified_base 14: mod_base = OTHER; note = adenosine-3'-phosphate
  modified_base 15: mod_base = OTHER; note = adenosine-3'-phosphate
  modified_base 16: mod_base = OTHER; note = cytidine-3'-phosphate
  modified_base 17: mod_base = OTHER; note = guanosine-3'-phosphate
  modified_base 18: mod_base = OTHER; note = uridine-3'-phosphate
  modified_base 19: mod_base = OTHER; note = uridine-3'-phosphate
  misc_feature 1..19: note = RNA
  misc_feature 20..21: note = DNA
ataaaaacaaacaaacgtttt

SEQ ID NO: 1300 - DNA, 21 bp, synthetic construct
  source 1..21: mol_type = other DNA
  modified_base 1: mod_base = OTHER; note = adenosine-3'-phosphate
  modified_base 2: mod_base = OTHER; note = adenosine-3'-phosphate
  modified_base 3: mod_base = OTHER; note = cytidine-3'-phosphate
  modified_base 4: mod_base = OTHER; note = guanosine-3'-phosphate
  modified_base 5: mod_base = OTHER; note = uridine-3'-phosphate
  modified_base 6: mod_base = OTHER; note = uridine-3'-phosphate
  modified_base 7: mod_base = OTHER; note = uridine-3'-phosphate
  modified_base 8: mod_base = OTHER; note = guanosine-3'-phosphate
  modified_base 9: mod_base = OTHER; note = uridine-3'-phosphate
  modified_base 10: mod_base = OTHER; note = uridine-3'-phosphate
  modified_base 11: mod_base = OTHER; note = uridine-3'-phosphate
  modified_base 12: mod_base = OTHER; note = guanosine-3'-phosphate
  modified_base 13: mod_base = OTHER; note = uridine-3'-phosphate
  modified_base 14: mod_base = OTHER; note = uridine-3'-phosphate
  modified_base 15: mod_base = OTHER; note = uridine-3'-phosphate
  modified_base 16: mod_base = OTHER; note = uridine-3'-phosphate
  modified_base 17: mod_base = OTHER; note = uridine-3'-phosphate
  modified_base 18: mod_base = OTHER; note = adenosine-3'-phosphate
  modified_base 19: mod_base = OTHER; note = uridine-3'-phosphate
  misc_feature 1..19: note = RNA
  misc_feature 20..21: note = DNA
aacgtttgtttgtttttattt

SEQ ID NO: 1301 - DNA, 21 bp, synthetic construct
  source 1..21: mol_type = other DNA
  modified_base 1: mod_base = OTHER; note = adenosine-3'-phosphate
  modified_base 2: mod_base = OTHER; note = adenosine-3'-phosphate
  modified_base 3: mod_base = OTHER; note = adenosine-3'-phosphate
  modified_base 4: mod_base = OTHER; note = cytidine-3'-phosphate
  modified_base 5: mod_base = OTHER; note = adenosine-3'-phosphate
  modified_base 6: mod_base = OTHER; note = adenosine-3'-phosphate
  modified_base 7: mod_base = OTHER; note = adenosine-3'-phosphate
  modified_base 8: mod_base = OTHER; note = cytidine-3'-phosphate
  modified_base 9: mod_base = OTHER; note = adenosine-3'-phosphate
  modified_base 10: mod_base = OTHER; note = adenosine-3'-phosphate
  modified_base 11: mod_base = OTHER; note = adenosine-3'-phosphate
  modified_base 12: mod_base = OTHER; note = cytidine-3'-phosphate
  modified_base 13: mod_base = OTHER; note = guanosine-3'-phosphate
  modified_base 14: mod_base = OTHER; note = uridine-3'-phosphate
  modified_base 15: mod_base = OTHER; note = uridine-3'-phosphate
  modified_base 16: mod_base = OTHER; note = guanosine-3'-phosphate
  modified_base 17: mod_base = OTHER; note = uridine-3'-phosphate
  modified_base 18: mod_base = OTHER; note = cytidine-3'-phosphate
  modified_base 19: mod_base = OTHER; note = cytidine-3'-phosphate
  misc_feature 1..19: note = RNA
  misc_feature 20..21: note = DNA
aaacaaacaaacgttgtcctt

SEQ ID NO: 1302 - DNA, 21 bp, synthetic construct
  source 1..21: mol_type = other DNA
  modified_base 1: mod_base = OTHER; note = guanosine-3'-phosphate
  modified_base 2: mod_base = OTHER; note = guanosine-3'-phosphate
  modified_base 3: mod_base = OTHER; note = adenosine-3'-phosphate
  modified_base 4: mod_base = OTHER; note = cytidine-3'-phosphate
  modified_base 5: mod_base = OTHER; note = adenosine-3'-phosphate
  modified_base 6: mod_base = OTHER; note = adenosine-3'-phosphate
  modified_base 7: mod_base = OTHER; note = cytidine-3'-phosphate
  modified_base 8: mod_base = OTHER; note = guanosine-3'-phosphate
  modified_base 9: mod_base = OTHER; note = uridine-3'-phosphate
  modified_base 10: mod_base = OTHER; note = uridine-3'-phosphate
  modified_base 11: mod_base = OTHER; note = uridine-3'-phosphate
  modified_base 12: mod_base = OTHER; note = guanosine-3'-phosphate
  modified_base 13: mod_base = OTHER; note = uridine-3'-phosphate
  modified_base 14: mod_base = OTHER; note = uridine-3'-phosphate
  modified_base 15: mod_base = OTHER; note = uridine-3'-phosphate
  modified_base 16: mod_base = OTHER; note = guanosine-3'-phosphate
  modified_base 17: mod_base = OTHER; note = uridine-3'-phosphate
  modified_base 18: mod_base = OTHER; note = uridine-3'-phosphate
  modified_base 19: mod_base = OTHER; note = uridine-3'-phosphate
  misc_feature 1..19: note = RNA
  misc_feature 20..21: note = DNA
ggacaacgtttgtttgttttt

SEQ ID NO: 1303 - DNA, 21 bp, synthetic construct
  source 1..21: mol_type = other DNA
  modified_base 1: mod_base = OTHER; note = adenosine-3'-phosphate
  modified_base 2: mod_base = OTHER; note = adenosine-3'-phosphate
  modified_base 3: mod_base = OTHER; note = cytidine-3'-phosphate
  modified_base 4: mod_base = OTHER; note = adenosine-3'-phosphate
  modified_base 5: mod_base = OTHER; note = adenosine-3'-phosphate
  modified_base 6: mod_base = OTHER; note = adenosine-3'-phosphate
  modified_base 7: mod_base = OTHER; note = cytidine-3'-phosphate
  modified_base 8: mod_base = OTHER; note = adenosine-3'-phosphate
  modified_base 9: mod_base = OTHER; note = adenosine-3'-phosphate
  modified_base 10: mod_base = OTHER; note = adenosine-3'-phosphate
  modified_base 11: mod_base = OTHER; note = cytidine-3'-phosphate
  modified_base 12: mod_base = OTHER; note = guanosine-3'-phosphate
  modified_base 13: mod_base = OTHER; note = uridine-3'-phosphate
  modified_base 14: mod_base = OTHER; note = uridine-3'-phosphate
  modified_base 15: mod_base = OTHER; note = guanosine-3'-phosphate
  modified_base 16: mod_base = OTHER; note = uridine-3'-phosphate
  modified_base 17: mod_base = OTHER; note = cytidine-3'-phosphate
  modified_base 18: mod_base = OTHER; note = cytidine-3'-phosphate
  modified_base 19: mod_base = OTHER; note = uridine-3'-phosphate
  misc_feature 1..19: note = RNA
  misc_feature 20..21: note = DNA
aacaaacaaacgttgtccttt

SEQ ID NO: 1304 - DNA, 21 bp, synthetic construct
  source 1..21: mol_type = other DNA
  modified_base 1: mod_base = OTHER; note = adenosine-3'-phosphate
  modified_base 2: mod_base = OTHER; note = guanosine-3'-phosphate
  modified_base 3: mod_base = OTHER; note = guanosine-3'-phosphate
  modified_base 4: mod_base = OTHER; note = adenosine-3'-phosphate
  modified_base 5: mod_base = OTHER; note = cytidine-3'-phosphate
  modified_base 6: mod_base = OTHER; note = adenosine-3'-phosphate
  modified_base 7: mod_base = OTHER; note = adenosine-3'-phosphate
  modified_base 8: mod_base = OTHER; note = cytidine-3'-phosphate
  modified_base 9: mod_base = OTHER; note = guanosine-3'-phosphate
  modified_base 10: mod_base = OTHER; note = uridine-3'-phosphate
  modified_base 11: mod_base = OTHER; note = uridine-3'-phosphate
  modified_base 12: mod_base = OTHER; note = uridine-3'-phosphate
  modified_base 13: mod_base = OTHER; note = guanosine-3'-phosphate
  modified_base 14: mod_base = OTHER; note = uridine-3'-phosphate
  modified_base 15: mod_base = OTHER; note = uridine-3'-phosphate
  modified_base 16: mod_base = OTHER; note = uridine-3'-phosphate
  modified_base 17: mod_base = OTHER; note = guanosine-3'-phosphate
  modified_base 18: mod_base = OTHER; note = uridine-3'-phosphate
  modified_base 19: mod_base = OTHER; note = uridine-3'-phosphate
  misc_feature 1..19: note = RNA
  misc_feature 20..21: note = DNA
aggacaacgtttgtttgtttt

SEQ ID NO: 1305 - DNA, 21 bp, synthetic construct
  source 1..21: mol_type = other DNA
  modified_base 1: mod_base = OTHER; note = guanosine-3'-phosphate
  modified_base 2: mod_base = OTHER; note = 2'-O-methylcytidine-3'-phosphate
  modified_base 3: mod_base = OTHER; note = 2'-O-methylcytidine-3'-phosphate
  modified_base 4: mod_base = OTHER; note = 2'-O-methyluridine-3'-phosphate
  modified_base 5: mod_base = OTHER; note = guanosine-3'-phosphate
  modified_base 6: mod_base = OTHER; note = guanosine-3'-phosphate
  modified_base 7: mod_base = OTHER; note = adenosine-3'-phosphate
  modified_base 8: mod_base = OTHER; note = guanosine-3'-phosphate
  modified_base 9: mod_base = OTHER; note = 2'-O-methyluridine-3'-phosphate
  modified_base 10: mod_base = OTHER; note = 2'-O-methyluridine-3'-phosphate
  modified_base 11: mod_base = OTHER; note = 2'-O-methyluridine-3'-phosphate
  modified_base 12: mod_base = OTHER; note = adenosine-3'-phosphate
  modified_base 13: mod_base = OTHER; note = 2'-O-methyluridine-3'-phosphate
  modified_base 14: mod_base = OTHER; note = 2'-O-methyluridine-3'-phosphate
  modified_base 15: mod_base = OTHER; note = 2'-O-methylcytidine-3'-phosphate
  modified_base 16: mod_base = OTHER; note = guanosine-3'-phosphate
  modified_base 17: mod_base = OTHER; note = guanosine-3'-phosphate
  modified_base 18: mod_base = OTHER; note = adenosine-3'-phosphate
  modified_base 19: mod_base = OTHER; note = adenosine-3'-phosphate
  modified_base 20: mod_base = OTHER; note = 2'-deoxythymidine-3'-phosphorothioate
  misc_feature 1..19: note = RNA
  misc_feature 20..21: note = DNA
gcctggagtttattcggaatt

SEQ ID NO: 1306 - DNA, 21 bp, synthetic construct
  source 1..21: mol_type = other DNA
  modified_base 1: mod_base = OTHER; note = uridine-3'-phosphate
  modified_base 2: mod_base = OTHER; note = uridine-3'-phosphate
  modified_base 3: mod_base = OTHER; note = cytidine-3'-phosphate
  modified_base 4: mod_base = OTHER; note = cytidine-3'-phosphate
  modified_base 5: mod_base = OTHER; note = guanosine-3'-phosphate
  modified_base 6: mod_base = OTHER; note = adenosine-3'-phosphate
  modified_base 7: mod_base = OTHER; note = adenosine-3'-phosphate
  modified_base 8: mod_base = OTHER; note = 2'-O-methyluridine-3'-phosphate
  modified_base 9: mod_base = OTHER; note = adenosine-3'-phosphate
  modified_base 10: mod_base = OTHER; note = adenosine-3'-phosphate
  modified_base 11: mod_base = OTHER; note = adenosine-3'-phosphate
  modified_base 12: mod_base = OTHER; note = cytidine-3'-phosphate
  modified_base 13: mod_base = OTHER; note = uridine-3'-phosphate
  modified_base 14: mod_base = OTHER; note = cytidine-3'-phosphate
  modified_base 15: mod_base = OTHER; note = 2'-O-methylcytidine-3'-phosphate
  modified_base 16: mod_base = OTHER; note = adenosine-3'-phosphate
  modified_base 17: mod_base = OTHER; note = guanosine-3'-phosphate
  modified_base 18: mod_base = OTHER; note = guanosine-3'-phosphate
  modified_base 19: mod_base = OTHER; note = cytidine-3'-phosphate
  modified_base 20: mod_base = OTHER; note = 2'-deoxythymidine-3'-phosphorothioate
  misc_feature 1..19: note = RNA
  misc_feature 20..21: note = DNA
ttccgaataaactccaggctt

SEQ ID NO: 1307 - DNA, 21 bp, synthetic construct
  source 1..21: mol_type = other DNA
  modified_base 1: mod_base = OTHER; note = guanosine-3'-phosphate
  modified_base 2: mod_base = OTHER; note = 2'-O-methylcytidine-3'-phosphate
  modified_base 3: mod_base = OTHER; note = 2'-O-methylcytidine-3'-phosphate
  modified_base 4: mod_base = OTHER; note = 2'-O-methyluridine-3'-phosphate
  modified_base 5: mod_base = OTHER; note = guanosine-3'-phosphate
  modified_base 6: mod_base = OTHER; note = guanosine-3'-phosphate
  modified_base 7: mod_base = OTHER; note = adenosine-3'-phosphate
  modified_base 8: mod_base = OTHER; note = guanosine-3'-phosphate
  modified_base 9: mod_base = OTHER; note = 2'-O-methyluridine-3'-phosphate
  modified_base 10: mod_base = OTHER; note = 2'-O-methyluridine-3'-phosphate
  modified_base 11: mod_base = OTHER; note = 2'-O-methyluridine-3'-phosphate
  modified_base 12: mod_base = OTHER; note = adenosine-3'-phosphate
  modified_base 13: mod_base = OTHER; note = 2'-O-methyluridine-3'-phosphate
  modified_base 14: mod_base = OTHER; note = 2'-O-methyluridine-3'-phosphate
  modified_base 15: mod_base = OTHER; note = 2'-O-methylcytidine-3'-phosphate
  modified_base 16: mod_base = OTHER; note = guanosine-3'-phosphate
  modified_base 17: mod_base = OTHER; note = guanosine-3'-phosphate
  modified_base 18: mod_base = OTHER; note = adenosine-3'-phosphate
  modified_base 19: mod_base = OTHER; note = adenosine-3'-phosphate
  modified_base 20: mod_base = OTHER; note = 2'-deoxythymidine-3'-phosphorothioate
  misc_feature 1..19: note = RNA
  misc_feature 20..21: note = DNA
gcctggagtttattcggaatt

SEQ ID NO: 1308 - DNA, 21 bp, synthetic construct
  source 1..21: mol_type = other DNA
  modified_base 1: mod_base = OTHER; note = 2'-O-methyluridine-3'-phosphate
  modified_base 2: mod_base = OTHER; note = uridine-3'-phosphate
  modified_base 3: mod_base = OTHER; note = 2'-O-methylcytidine-3'-phosphate
  modified_base 4: mod_base = OTHER; note = cytidine-3'-phosphate
  modified_base 5: mod_base = OTHER; note = guanosine-3'-phosphate
  modified_base 6: mod_base = OTHER; note = adenosine-3'-phosphate
  modified_base 7: mod_base = OTHER; note = adenosine-3'-phosphate
  modified_base 8: mod_base = OTHER; note = 2'-O-methyluridine-3'-phosphate
  modified_base 9: mod_base = OTHER; note = adenosine-3'-phosphate
  modified_base 10: mod_base = OTHER; note = adenosine-3'-phosphate
  modified_base 11: mod_base = OTHER; note = adenosine-3'-phosphate
  modified_base 12: mod_base = OTHER; note = cytidine-3'-phosphate
  modified_base 13: mod_base = OTHER; note = uridine-3'-phosphate
  modified_base 14: mod_base = OTHER; note = 2'-O-methylcytidine-3'-phosphate
  modified_base 15: mod_base = OTHER; note = 2'-O-methylcytidine-3'-phosphate
  modified_base 16: mod_base = OTHER; note = adenosine-3'-phosphate
  modified_base 17: mod_base = OTHER; note = guanosine-3'-phosphate
  modified_base 18: mod_base = OTHER; note = guanosine-3'-phosphate
  modified_base 19: mod_base = OTHER; note = cytidine-3'-phosphate
  modified_base 20: mod_base = OTHER; note = 2'-deoxythymidine-3'-phosphorothioate
  misc_feature 1..19: note = RNA
  misc_feature 20..21: note = DNA
ttccgaataaactccaggctt

SEQ ID NO: 1309 - DNA, 21 bp, synthetic construct
  source 1..21: mol_type = other DNA
  modified_base 1: mod_base = OTHER; note = guanosine-3'-phosphate
  modified_base 2: mod_base = OTHER; note = 2'-O-methylcytidine-3'-phosphate
  modified_base 3: mod_base = OTHER; note = 2'-O-methylcytidine-3'-phosphate
  modified_base 4: mod_base = OTHER; note = 2'-O-methyluridine-3'-phosphate
  modified_base 5: mod_base = OTHER; note = guanosine-3'-phosphate
  modified_base 6: mod_base = OTHER; note = guanosine-3'-phosphate
  modified_base 7: mod_base = OTHER; note = adenosine-3'-phosphate
  modified_base 8: mod_base = OTHER; note = guanosine-3'-phosphate
  modified_base 9: mod_base = OTHER; note = 2'-O-methyluridine-3'-phosphate
  modified_base 10: mod_base = OTHER; note = 2'-O-methyluridine-3'-phosphate
  modified_base 11: mod_base = OTHER; note = 2'-O-methyluridine-3'-phosphate
  modified_base 12: mod_base = OTHER; note = adenosine-3'-phosphate
  modified_base 13: mod_base = OTHER; note = 2'-O-methyluridine-3'-phosphate
  modified_base 14: mod_base = OTHER; note = 2'-O-methyluridine-3'-phosphate
  modified_base 15: mod_base = OTHER; note = 2'-O-methylcytidine-3'-phosphate
  modified_base 16: mod_base = OTHER; note = guanosine-3'-phosphate
  modified_base 17: mod_base = OTHER; note = guanosine-3'-phosphate
  modified_base 18: mod_base = OTHER; note = adenosine-3'-phosphate
  modified_base 19: mod_base = OTHER; note = adenosine-3'-phosphate
  modified_base 20: mod_base = OTHER; note = 2'-deoxythymidine-3'-phosphorothioate
  misc_feature 1..19: note = RNA
  misc_feature 20..21: note = DNA
gcctggagtttattcggaatt

SEQ ID NO: 1310 - DNA, 21 bp, synthetic construct
  source 1..21: mol_type = other DNA
  modified_base 1: mod_base = OTHER; note = uridine-3'-phosphate
  modified_base 2: mod_base = OTHER; note = uridine-3'-phosphate
  modified_base 3: mod_base = OTHER; note = cytidine-3'-phosphate
  modified_base 4: mod_base = OTHER; note = cytidine-3'-phosphate
  modified_base 5: mod_base = OTHER; note = guanosine-3'-phosphate
  modified_base 6: mod_base = OTHER; note = adenosine-3'-phosphate
  modified_base 7: mod_base = OTHER; note = adenosine-3'-phosphate
  modified_base 8: mod_base = OTHER; note = uridine-3'-phosphate
  modified_base 9: mod_base = OTHER; note = adenosine-3'-phosphate
  modified_base 10: mod_base = OTHER; note = adenosine-3'-phosphate
  modified_base 11: mod_base = OTHER; note = adenosine-3'-phosphate
  modified_base 12: mod_base = OTHER; note = cytidine-3'-phosphate
  modified_base 13: mod_base = OTHER; note = uridine-3'-phosphate
  modified_base 14: mod_base = OTHER; note = cytidine-3'-phosphate
  modified_base 15: mod_base = OTHER; note = cytidine-3'-phosphate
  modified_base 16: mod_base = OTHER; note = adenosine-3'-phosphate
  modified_base 17: mod_base = OTHER; note = guanosine-3'-phosphate
  modified_base 18: mod_base = OTHER; note = guanosine-3'-phosphate
  modified_base 19: mod_base = OTHER; note = cytidine-3'-phosphate
  modified_base 20: mod_base = OTHER; note = 2'-deoxythymidine-3'-phosphorothioate
  misc_feature 1..19: note = RNA
  misc_feature 20..21: note = DNA
ttccgaataaactccaggctt

SEQ ID NO: 1311 - DNA, 21 bp, synthetic construct
  source 1..21: mol_type = other DNA
  modified_base 1: mod_base = OTHER; note = guanosine-3'-phosphate
  modified_base 2: mod_base = OTHER; note = 2'-O-methylcytidine-3'-phosphate
  modified_base 3: mod_base = OTHER; note = 2'-O-methylcytidine-3'-phosphate
  modified_base 4: mod_base = OTHER; note = 2'-O-methyluridine-3'-phosphate
  modified_base 5: mod_base = OTHER; note = guanosine-3'-phosphate
  modified_base 6: mod_base = OTHER; note = guanosine-3'-phosphate
  modified_base 7: mod_base = OTHER; note = adenosine-3'-phosphate
  modified_base 8: mod_base = OTHER; note = guanosine-3'-phosphate
  modified_base 9: mod_base = OTHER; note = 2'-O-methyluridine-3'-phosphate
  modified_base 10: mod_base = OTHER; note = 2'-O-methyluridine-3'-phosphate
  modified_base 11: mod_base = OTHER; note = 2'-O-methyluridine-3'-phosphate
  modified_base 12: mod_base = OTHER; note = adenosine-3'-phosphate
  modified_base 13: mod_base = OTHER; note = 2'-O-methyluridine-3'-phosphate
  modified_base 14: mod_base = OTHER; note = 2'-O-methyluridine-3'-phosphate
  modified_base 15: mod_base = OTHER; note = 2'-O-methylcytidine-3'-phosphate
  modified_base 16: mod_base = OTHER; note = guanosine-3'-phosphate
  modified_base 17: mod_base = OTHER; note = guanosine-3'-phosphate
  modified_base 18: mod_base = OTHER; note = adenosine-3'-phosphate
  modified_base 19: mod_base = OTHER; note = adenosine-3'-phosphate
  modified_base 20: mod_base = OTHER; note = 2'-deoxythymidine-3'-phosphorothioate
  misc_feature 1..19: note = RNA
  misc_feature 20..21: note = DNA
gcctggagtttattcggaatt

SEQ ID NO: 1312 - DNA, 21 bp, synthetic construct
  source 1..21: mol_type = other DNA
  modified_base 1: mod_base = OTHER; note = 2'-O-methyluridine-3'-phosphate
  modified_base 2: mod_base = OTHER; note = uridine-3'-phosphate
  modified_base 3: mod_base = OTHER; note = cytidine-3'-phosphate
  modified_base 4: mod_base = OTHER; note = cytidine-3'-phosphate
  modified_base 5: mod_base = OTHER; note = guanosine-3'-phosphate
  modified_base 6: mod_base = OTHER; note = adenosine-3'-phosphate
  modified_base 7: mod_base = OTHER; note = adenosine-3'-phosphate
  modified_base 8: mod_base = OTHER; note = uridine-3'-phosphate
  modified_base 9: mod_base = OTHER; note = adenosine-3'-phosphate
  modified_base 10: mod_base = OTHER; note = adenosine-3'-phosphate
  modified_base 11: mod_base = OTHER; note = adenosine-3'-phosphate
  modified_base 12: mod_base = OTHER; note = cytidine-3'-phosphate
  modified_base 13: mod_base = OTHER; note = uridine-3'-phosphate
  modified_base 14: mod_base = OTHER; note = cytidine-3'-phosphate
  modified_base 15: mod_base = OTHER; note = cytidine-3'-phosphate
  modified_base 16: mod_base = OTHER; note = adenosine-3'-phosphate
  modified_base 17: mod_base = OTHER; note = guanosine-3'-phosphate
  modified_base 18: mod_base = OTHER; note = guanosine-3'-phosphate
  modified_base 19: mod_base = OTHER; note = cytidine-3'-phosphate
  modified_base 20: mod_base = OTHER; note = 2'-deoxythymidine-3'-phosphorothioate
  misc_feature 1..19: note = RNA
  misc_feature 20..21: note = DNA
ttccgaataaactccaggctt

SEQ ID NO: 1313 - DNA, 21 bp, synthetic construct
  source 1..21: mol_type = other DNA
  modified_base 1: mod_base = OTHER; note = guanosine-3'-phosphate
  modified_base 2: mod_base = OTHER; note = 2'-O-methylcytidine-3'-phosphate
  modified_base 3: mod_base = OTHER; note = 2'-O-methylcytidine-3'-phosphate
  modified_base 4: mod_base = OTHER; note = 2'-O-methyluridine-3'-phosphate
  modified_base 5: mod_base = OTHER; note = guanosine-3'-phosphate
  modified_base 6: mod_base = OTHER; note = guanosine-3'-phosphate
  modified_base 7: mod_base = OTHER; note = adenosine-3'-phosphate
  modified_base 8: mod_base = OTHER; note = guanosine-3'-phosphate
  modified_base 9: mod_base = OTHER; note = 2'-O-methyluridine-3'-phosphate
  modified_base 10: mod_base = OTHER; note = 2'-O-methyluridine-3'-phosphate
  modified_base 11: mod_base = OTHER; note = 2'-O-methyluridine-3'-phosphate
  modified_base 12: mod_base = OTHER; note = adenosine-3'-phosphate
  modified_base 13: mod_base = OTHER; note = 2'-O-methyluridine-3'-phosphate
  modified_base 14: mod_base = OTHER; note = 2'-O-methyluridine-3'-phosphate
  modified_base 15: mod_base = OTHER; note = 2'-O-methylcytidine-3'-phosphate
  modified_base 16: mod_base = OTHER; note = guanosine-3'-phosphate
  modified_base 17: mod_base = OTHER; note = guanosine-3'-phosphate
  modified_base 18: mod_base = OTHER; note = adenosine-3'-phosphate
  modified_base 19: mod_base = OTHER; note = adenosine-3'-phosphate
  modified_base 20: mod_base = OTHER; note = 2'-deoxythymidine-3'-phosphorothioate
  misc_feature 1..19: note = RNA
  misc_feature 20..21: note = DNA
gcctggagtttattcggaatt

SEQ ID NO: 1314 - DNA, 21 bp, synthetic construct
  source 1..21: mol_type = other DNA
  modified_base 1: mod_base = OTHER; note = uridine-3'-phosphate
  modified_base 2: mod_base = OTHER; note = 2'-O-methyluridine-3'-phosphate
  modified_base 3: mod_base = OTHER; note = cytidine-3'-phosphate
  modified_base 4: mod_base = OTHER; note = cytidine-3'-phosphate
  modified_base 5: mod_base = OTHER; note = guanosine-3'-phosphate
  modified_base 6: mod_base = OTHER; note = adenosine-3'-phosphate
  modified_base 7: mod_base = OTHER; note = adenosine-3'-phosphate
  modified_base 8: mod_base = OTHER; note = uridine-3'-phosphate
  modified_base 9: mod_base = OTHER; note = adenosine-3'-phosphate
  modified_base 10: mod_base = OTHER; note = adenosine-3'-phosphate
  modified_base 11: mod_base = OTHER; note = adenosine-3'-phosphate
  modified_base 12: mod_base = OTHER; note = cytidine-3'-phosphate
  modified_base 13: mod_base = OTHER; note = uridine-3'-phosphate
  modified_base 14: mod_base = OTHER; note = cytidine-3'-phosphate
  modified_base 15: mod_base = OTHER; note = cytidine-3'-phosphate
  modified_base 16: mod_base = OTHER; note = adenosine-3'-phosphate
  modified_base 17: mod_base = OTHER; note = guanosine-3'-phosphate
  modified_base 18: mod_base = OTHER; note = guanosine-3'-phosphate
  modified_base 19: mod_base = OTHER; note = cytidine-3'-phosphate
  modified_base 20: mod_base = OTHER; note = 2'-deoxythymidine-3'-phosphorothioate
  misc_feature 1..19: note = RNA
  misc_feature 20..21: note = DNA
ttccgaataaactccaggctt

SEQ ID NO: 1315 - DNA, 21 bp, synthetic construct
  source 1..21: mol_type = other DNA
  modified_base 1: mod_base = OTHER; note = guanosine-3'-phosphate
  modified_base 2: mod_base = OTHER; note = 2'-O-methylcytidine-3'-phosphate
  modified_base 3: mod_base = OTHER; note = 2'-O-methylcytidine-3'-phosphate
  modified_base 4: mod_base = OTHER; note = 2'-O-methyluridine-3'-phosphate
  modified_base 5: mod_base = OTHER; note = guanosine-3'-phosphate
  modified_base 6: mod_base = OTHER; note = guanosine-3'-phosphate
  modified_base 7: mod_base = OTHER; note = adenosine-3'-phosphate
  modified_base 8: mod_base = OTHER; note = guanosine-3'-phosphate
  modified_base 9: mod_base = OTHER; note = 2'-O-methyluridine-3'-phosphate
  modified_base 10: mod_base = OTHER; note = 2'-O-methyluridine-3'-phosphate
  modified_base 11: mod_base = OTHER; note = 2'-O-methyluridine-3'-phosphate
  modified_base 12: mod_base = OTHER; note = adenosine-3'-phosphate
  modified_base 13: mod_base = OTHER; note = 2'-O-methyluridine-3'-phosphate
  modified_base 14: mod_base = OTHER; note = 2'-O-methyluridine-3'-phosphate
  modified_base 15: mod_base = OTHER; note = 2'-O-methylcytidine-3'-phosphate
  modified_base 16: mod_base = OTHER; note = guanosine-3'-phosphate
  modified_base 17: mod_base = OTHER; note = guanosine-3'-phosphate
  modified_base 18: mod_base = OTHER; note = adenosine-3'-phosphate
  modified_base 19: mod_base = OTHER; note = adenosine-3'-phosphate
  modified_base 20: mod_base = OTHER; note = 2'-deoxythymidine-3'-phosphorothioate
  misc_feature 1..19: note = RNA
  misc_feature 20..21: note = DNA
gcctggagtttattcggaatt

SEQ ID NO: 1316 - DNA, 21 bp, synthetic construct
  source 1..21: mol_type = other DNA
  modified_base 1: mod_base = OTHER; note = uridine-3'-phosphate
  modified_base 2: mod_base = OTHER; note = uridine-3'-phosphate
  modified_base 3: mod_base = OTHER; note = 2'-O-methylcytidine-3'-phosphate
  modified_base 4: mod_base = OTHER; note = cytidine-3'-phosphate
  modified_base 5: mod_base = OTHER; note = guanosine-3'-phosphate
  modified_base 6: mod_base = OTHER; note = adenosine-3'-phosphate
  modified_base 7: mod_base = OTHER; note = adenosine-3'-phosphate
  modified_base 8: mod_base = OTHER; note = uridine-3'-phosphate
  modified_base 9: mod_base = OTHER; note = adenosine-3'-phosphate
  modified_base 10: mod_base = OTHER; note = adenosine-3'-phosphate
  modified_base 11: mod_base = OTHER; note = adenosine-3'-phosphate
  modified_base 12: mod_base = OTHER; note = cytidine-3'-phosphate
  modified_base 13: mod_base = OTHER; note = uridine-3'-phosphate
  modified_base 14: mod_base = OTHER; note = cytidine-3'-phosphate
  modified_base 15: mod_base = OTHER; note = cytidine-3'-phosphate
  modified_base 16: mod_base = OTHER; note = adenosine-3'-phosphate
  modified_base 17: mod_base = OTHER; note = guanosine-3'-phosphate
  modified_base 18: mod_base = OTHER; note = guanosine-3'-phosphate
  modified_base 19: mod_base = OTHER; note = cytidine-3'-phosphate
  modified_base 20: mod_base = OTHER; note = 2'-deoxythymidine-3'-phosphorothioate
  misc_feature 1..19: note = RNA
  misc_feature 20..21: note = DNA
ttccgaataaactccaggctt

SEQ ID NO: 1317 - DNA, 21 bp, synthetic construct
  source 1..21: mol_type = other DNA
  modified_base 1: mod_base = OTHER; note = guanosine-3'-phosphate
  modified_base 2: mod_base = OTHER; note = 2'-O-methylcytidine-3'-phosphate
  modified_base 3: mod_base = OTHER; note = 2'-O-methylcytidine-3'-phosphate
  modified_base 4: mod_base = OTHER; note = 2'-O-methyluridine-3'-phosphate
  modified_base 5: mod_base = OTHER; note = guanosine-3'-phosphate
  modified_base 6: mod_base = OTHER; note = guanosine-3'-phosphate
  modified_base 7: mod_base = OTHER; note = adenosine-3'-phosphate
  modified_base 8: mod_base = OTHER; note = guanosine-3'-phosphate
  modified_base 9: mod_base = OTHER; note = 2'-O-methyluridine-3'-phosphate
  modified_base 10: mod_base = OTHER; note = 2'-O-methyluridine-3'-phosphate
  modified_base 11: mod_base = OTHER; note = 2'-O-methyluridine-3'-phosphate
  modified_base 12: mod_base = OTHER; note = adenosine-3'-phosphate
  modified_base 13: mod_base = OTHER; note = 2'-O-methyluridine-3'-phosphate
  modified_base 14: mod_base = OTHER; note = 2'-O-methyluridine-3'-phosphate
  modified_base 15: mod_base = OTHER; note = 2'-O-methylcytidine-3'-phosphate
  modified_base 16: mod_base = OTHER; note = guanosine-3'-phosphate
  modified_base 17: mod_base = OTHER; note = guanosine-3'-phosphate
  modified_base 18: mod_base = OTHER; note = adenosine-3'-phosphate
  modified_base 19: mod_base = OTHER; note = adenosine-3'-phosphate
  modified_base 20: mod_base = OTHER; note = 2'-deoxythymidine-3'-phosphorothioate
  misc_feature 1..19: note = RNA
  misc_feature 20..21: note = DNA
gcctggagtttattcggaatt

SEQ ID NO: 1318 - DNA, 21 bp, synthetic construct
  source 1..21: mol_type = other DNA
  modified_base 1: mod_base = OTHER; note = uridine-3'-phosphate
  modified_base 2: mod_base = OTHER; note = uridine-3'-phosphate
  modified_base 3: mod_base = OTHER; note = cytidine-3'-phosphate
  modified_base 4: mod_base = OTHER; note = 2'-O-methylcytidine-3'-phosphate
  modified_base 5: mod_base = OTHER; note = guanosine-3'-phosphate
  modified_base 6: mod_base = OTHER; note = adenosine-3'-phosphate
  modified_base 7: mod_base = OTHER; note = adenosine-3'-phosphate
  modified_base 8: mod_base = OTHER; note = uridine-3'-phosphate
  modified_base 9: mod_base = OTHER; note = adenosine-3'-phosphate
  modified_base 10: mod_base = OTHER; note = adenosine-3'-phosphate
  modified_base 11: mod_base = OTHER; note = adenosine-3'-phosphate
  modified_base 12: mod_base = OTHER; note = cytidine-3'-phosphate
  modified_base 13: mod_base = OTHER; note = uridine-3'-phosphate
  modified_base 14: mod_base = OTHER; note = cytidine-3'-phosphate
  modified_base 15: mod_base = OTHER; note = cytidine-3'-phosphate
  modified_base 16: mod_base = OTHER; note = adenosine-3'-phosphate
  modified_base 17: mod_base = OTHER; note = guanosine-3'-phosphate
  modified_base 18: mod_base = OTHER; note = guanosine-3'-phosphate
  modified_base 19: mod_base = OTHER; note = cytidine-3'-phosphate
  modified_base 20: mod_base = OTHER; note = 2'-deoxythymidine-3'-phosphorothioate
  misc_feature 1..19: note = RNA
  misc_feature 20..21: note = DNA
ttccgaataaactccaggctt

SEQ ID NO: 1319 - DNA, 21 bp, synthetic construct
  source 1..21: mol_type = other DNA
  modified_base 1: mod_base = OTHER; note = guanosine-3'-phosphate
  modified_base 2: mod_base = OTHER; note = cytidine-3'-phosphate
  modified_base 3: mod_base = OTHER; note = cytidine-3'-phosphate
  modified_base 4: mod_base = OTHER; note = uridine-3'-phosphate
  modified_base 5: mod_base = OTHER; note = guanosine-3'-phosphate
  modified_base 6: mod_base = OTHER; note = guanosine-3'-phosphate
  modified_base 7: mod_base = OTHER; note = adenosine-3'-phosphate
  modified_base 8: mod_base = OTHER; note = guanosine-3'-phosphate
  modified_base 9: mod_base = OTHER; note = uridine-3'-phosphate
  modified_base 10: mod_base = OTHER; note = uridine-3'-phosphate
  modified_base 11: mod_base = OTHER; note = uridine-3'-phosphate
  modified_base 12: mod_base = OTHER; note = adenosine-3'-phosphate
  modified_base 13: mod_base = OTHER; note = uridine-3'-phosphate
  modified_base 14: mod_base = OTHER; note = uridine-3'-phosphate
  modified_base 15: mod_base = OTHER; note = cytidine-3'-phosphate
  modified_base 16: mod_base = OTHER; note = guanosine-3'-phosphate
  modified_base 17: mod_base = OTHER; note = guanosine-3'-phosphate
  modified_base 18: mod_base = OTHER; note = adenosine-3'-phosphate
  modified_base 19: mod_base = OTHER; note = adenosine-3'-phosphate
  modified_base 20: mod_base = OTHER; note = 2'-deoxythymidine-3'-phosphorothioate
  misc_feature 1..19: note = RNA
  misc_feature 20..21: note = DNA
gcctggagtttattcggaatt

SEQ ID NO: 1320 - DNA, 21 bp, synthetic construct
  source 1..21: mol_type = other DNA
  modified_base 1: mod_base = OTHER; note = 2'-O-methyluridine-3'-phosphate
  modified_base 2: mod_base = OTHER; note = uridine-3'-phosphate
  modified_base 3: mod_base = OTHER; note = cytidine-3'-phosphate
  modified_base 4: mod_base = OTHER; note = cytidine-3'-phosphate
  modified_base 5: mod_base = OTHER; note = guanosine-3'-phosphate
  modified_base 6: mod_base = OTHER; note = adenosine-3'-phosphate
  modified_base 7: mod_base = OTHER; note = adenosine-3'-phosphate
  modified_base 8: mod_base = OTHER; note = uridine-3'-phosphate
  modified_base 9: mod_base = OTHER; note = adenosine-3'-phosphate
  modified_base 10: mod_base = OTHER; note = adenosine-3'-phosphate
  modified_base 11: mod_base = OTHER; note = adenosine-3'-phosphate
  modified_base 12: mod_base = OTHER; note = cytidine-3'-phosphate
  modified_base 13: mod_base = OTHER; note = uridine-3'-phosphate
  modified_base 14: mod_base = OTHER; note = cytidine-3'-phosphate
  modified_base 15: mod_base = OTHER; note = cytidine-3'-phosphate
  modified_base 16: mod_base = OTHER; note = adenosine-3'-phosphate
  modified_base 17: mod_base = OTHER; note = guanosine-3'-phosphate
  modified_base 18: mod_base = OTHER; note = guanosine-3'-phosphate
  modified_base 19: mod_base = OTHER; note = cytidine-3'-phosphate
  modified_base 20: mod_base = OTHER; note = 2'-deoxythymidine-3'-phosphorothioate
  misc_feature 1..19: note = RNA
  misc_feature 20..21: note = DNA
ttccgaataaactccaggctt

SEQ ID NO: 1321 - DNA, 21 bp, synthetic construct
  source 1..21: mol_type = other DNA
  modified_base 1: mod_base = OTHER; note = guanosine-3'-phosphate
  modified_base 2: mod_base = OTHER; note = cytidine-3'-phosphate
  modified_base 3: mod_base = OTHER; note = cytidine-3'-phosphate
  modified_base 4: mod_base = OTHER; note = uridine-3'-phosphate
  modified_base 5: mod_base = OTHER; note = guanosine-3'-phosphate
  modified_base 6: mod_base = OTHER; note = guanosine-3'-phosphate
  modified_base 7: mod_base = OTHER; note = adenosine-3'-phosphate
  modified_base 8: mod_base = OTHER; note = guanosine-3'-phosphate
  modified_base 9: mod_base = OTHER; note = uridine-3'-phosphate
  modified_base 10: mod_base = OTHER; note = uridine-3'-phosphate
  modified_base 11: mod_base = OTHER; note = uridine-3'-phosphate
  modified_base 12: mod_base = OTHER; note = adenosine-3'-phosphate
  modified_base 13: mod_base = OTHER; note = uridine-3'-phosphate
  modified_base 14: mod_base = OTHER; note = uridine-3'-phosphate
  modified_base 15: mod_base = OTHER; note = cytidine-3'-phosphate
  modified_base 16: mod_base = OTHER; note = guanosine-3'-phosphate
  modified_base 17: mod_base = OTHER; note = guanosine-3'-phosphate
  modified_base 18: mod_base = OTHER; note = adenosine-3'-phosphate
  modified_base 19: mod_base = OTHER; note = adenosine-3'-phosphate
  modified_base 20: mod_base = OTHER; note = 2'-deoxythymidine-3'-phosphorothioate
  misc_feature 1..19: note = RNA
  misc_feature 20..21: note = DNA
gcctggagtttattcggaatt

SEQ ID NO: 1322 - DNA, 21 bp, synthetic construct
  source 1..21: mol_type = other DNA
  modified_base 1: mod_base = OTHER; note = uridine-3'-phosphate
  modified_base 2: mod_base = OTHER; note = 2'-O-methyluridine-3'-phosphate
  modified_base 3: mod_base = OTHER; note = cytidine-3'-phosphate
  modified_base 4: mod_base = OTHER; note = cytidine-3'-phosphate
  modified_base 5: mod_base = OTHER; note = guanosine-3'-phosphate
  modified_base 6: mod_base = OTHER; note = adenosine-3'-phosphate
  modified_base 7: mod_base = OTHER; note = adenosine-3'-phosphate
  modified_base 8: mod_base = OTHER; note = uridine-3'-phosphate
  modified_base 9: mod_base = OTHER; note = adenosine-3'-phosphate
  modified_base 10: mod_base = OTHER; note = adenosine-3'-phosphate
  modified_base 11: mod_base = OTHER; note = adenosine-3'-phosphate
  modified_base 12: mod_base = OTHER; note = cytidine-3'-phosphate
  modified_base 13: mod_base = OTHER; note = uridine-3'-phosphate
  modified_base 14: mod_base = OTHER; note = cytidine-3'-phosphate
  modified_base 15: mod_base = OTHER; note = cytidine-3'-phosphate
  modified_base 16: mod_base = OTHER; note = adenosine-3'-phosphate
  modified_base 17: mod_base = OTHER; note = guanosine-3'-phosphate
  modified_base 18: mod_base = OTHER; note = guanosine-3'-phosphate
  modified_base 19: mod_base = OTHER; note = cytidine-3'-phosphate
  modified_base 20: mod_base = OTHER; note = 2'-deoxythymidine-3'-phosphorothioate
  misc_feature 1..19: note = RNA
  misc_feature 20..21: note = DNA
ttccgaataaactccaggctt

SEQ ID NO: 1323 - DNA, 21 bp, synthetic construct
  source 1..21: mol_type = other DNA
  modified_base 1: mod_base = OTHER; note = guanosine-3'-phosphate
  modified_base 2: mod_base = OTHER; note = cytidine-3'-phosphate
  modified_base 3: mod_base = OTHER; note = cytidine-3'-phosphate
  modified_base 4: mod_base = OTHER; note = uridine-3'-phosphate
  modified_base 5: mod_base = OTHER; note = guanosine-3'-phosphate
  modified_base 6: mod_base = OTHER; note = guanosine-3'-phosphate
  modified_base 7: mod_base = OTHER; note = adenosine-3'-phosphate
  modified_base 8: mod_base = OTHER; note = guanosine-3'-phosphate
  modified_base 9: mod_base = OTHER; note = uridine-3'-phosphate
  modified_base 10: mod_base = OTHER; note = uridine-3'-phosphate
  modified_base 11: mod_base = OTHER; note = uridine-3'-phosphate
  modified_base 12: mod_base = OTHER; note = adenosine-3'-phosphate
  modified_base 13: mod_base = OTHER; note = uridine-3'-phosphate
  modified_base 14: mod_base = OTHER; note = uridine-3'-phosphate
  modified_base 15: mod_base = OTHER; note = cytidine-3'-phosphate
  modified_base 16: mod_base = OTHER; note = guanosine-3'-phosphate
  modified_base 17: mod_base = OTHER; note = guanosine-3'-phosphate
  modified_base 18: mod_base = OTHER; note = adenosine-3'-phosphate
  modified_base 19: mod_base = OTHER; note = adenosine-3'-phosphate
  modified_base 20: mod_base = OTHER; note = 2'-deoxythymidine-3'-phosphorothioate
  misc_feature 1..19: note = RNA
  misc_feature 20..21: note = DNA
gcctggagtttattcggaatt

SEQ ID NO: 1324 - DNA, 21 bp, synthetic construct
  source 1..21: mol_type = other DNA
  modified_base 1: mod_base = OTHER; note = uridine-3'-phosphate
  modified_base 2: mod_base = OTHER; note = uridine-3'-phosphate
  modified_base 3: mod_base = OTHER; note = 2'-O-methylcytidine-3'-phosphate
  modified_base 4: mod_base = OTHER; note = cytidine-3'-phosphate
  modified_base 5: mod_base = OTHER; note = guanosine-3'-phosphate
  modified_base 6: mod_base = OTHER; note = adenosine-3'-phosphate
  modified_base 7: mod_base = OTHER; note = adenosine-3'-phosphate
  modified_base 8: mod_base = OTHER; note = uridine-3'-phosphate
  modified_base 9: mod_base = OTHER; note = adenosine-3'-phosphate
  modified_base 10: mod_base = OTHER; note = adenosine-3'-phosphate
  modified_base 11: mod_base = OTHER; note = adenosine-3'-phosphate
  modified_base 12: mod_base = OTHER; note = cytidine-3'-phosphate
  modified_base 13: mod_base = OTHER; note = uridine-3'-phosphate
  modified_base 14: mod_base = OTHER; note = cytidine-3'-phosphate
  modified_base 15: mod_base = OTHER; note = cytidine-3'-phosphate
  modified_base 16: mod_base = OTHER; note = adenosine-3'-phosphate
  modified_base 17: mod_base = OTHER; note = guanosine-3'-phosphate
  modified_base 18: mod_base = OTHER; note = guanosine-3'-phosphate
  modified_base 19: mod_base = OTHER; note = cytidine-3'-phosphate
  modified_base 20: mod_base = OTHER; note = 2'-deoxythymidine-3'-phosphorothioate
  misc_feature 1..19: note = RNA
  misc_feature 20..21: note = DNA
ttccgaataaactccaggctt

SEQ ID NO: 1325 - DNA, 21 bp, synthetic construct
  source 1..21: mol_type = other DNA
  modified_base 1: mod_base = OTHER; note = guanosine-3'-phosphate
  modified_base 2: mod_base = OTHER; note = cytidine-3'-phosphate
  modified_base 3: mod_base = OTHER; note = cytidine-3'-phosphate
  modified_base 4: mod_base = OTHER; note = uridine-3'-phosphate
  modified_base 5: mod_base = OTHER; note = guanosine-3'-phosphate
  modified_base 6: mod_base = OTHER; note = guanosine-3'-phosphate
  modified_base 7: mod_base = OTHER; note = adenosine-3'-phosphate
  modified_base 8: mod_base = OTHER; note = guanosine-3'-phosphate
  modified_base 9: mod_base = OTHER; note = uridine-3'-phosphate
  modified_base 10: mod_base = OTHER; note = uridine-3'-phosphate
  modified_base 11: mod_base = OTHER; note = uridine-3'-phosphate
  modified_base 12: mod_base = OTHER; note = adenosine-3'-phosphate
  modified_base 13: mod_base = OTHER; note = uridine-3'-phosphate
  modified_base 14: mod_base = OTHER; note = uridine-3'-phosphate
  modified_base 15: mod_base = OTHER; note = cytidine-3'-phosphate
  modified_base 16: mod_base = OTHER; note = guanosine-3'-phosphate
  modified_base 17: mod_base = OTHER; note = guanosine-3'-phosphate
  modified_base 18: mod_base = OTHER; note = adenosine-3'-phosphate
  modified_base 19: mod_base = OTHER; note = adenosine-3'-phosphate
  modified_base 20: mod_base = OTHER; note = 2'-deoxythymidine-3'-phosphorothioate
  misc_feature 1..19: note = RNA
  misc_feature 20..21: note = DNA
gcctggagtttattcggaatt

SEQ ID NO: 1326 - DNA, 21 bp, synthetic construct
  source 1..21: mol_type = other DNA
  modified_base 1: mod_base = OTHER; note = uridine-3'-phosphate
  modified_base 2: mod_base = OTHER; note = uridine-3'-phosphate
  modified_base 3: mod_base = OTHER; note = cytidine-3'-phosphate
  modified_base 4: mod_base = OTHER; note = 2'-O-methylcytidine-3'-phosphate
  modified_base 5: mod_base = OTHER; note = guanosine-3'-phosphate
  modified_base 6: mod_base = OTHER; note = adenosine-3'-phosphate
  modified_base 7: mod_base = OTHER; note = adenosine-3'-phosphate
  modified_base 8: mod_base = OTHER; note = uridine-3'-phosphate
  modified_base 9: mod_base = OTHER; note = adenosine-3'-phosphate
  modified_base 10: mod_base = OTHER; note = adenosine-3'-phosphate
  modified_base 11: mod_base = OTHER; note = adenosine-3'-phosphate
  modified_base 12: mod_base = OTHER; note = cytidine-3'-phosphate
  modified_base 13: mod_base = OTHER; note = uridine-3'-phosphate
  modified_base 14: mod_base = OTHER; note = cytidine-3'-phosphate
  modified_base 15: mod_base = OTHER; note = cytidine-3'-phosphate
  modified_base 16: mod_base = OTHER; note = adenosine-3'-phosphate
  modified_base 17: mod_base = OTHER; note = guanosine-3'-phosphate
  modified_base 18: mod_base = OTHER; note = guanosine-3'-phosphate
  modified_base 19: mod_base = OTHER; note = cytidine-3'-phosphate
  modified_base 20: mod_base = OTHER; note = 2'-deoxythymidine-3'-phosphorothioate
  misc_feature 1..19: note = RNA
  misc_feature 20..21: note = DNA
ttccgaataaactccaggctt

SEQ ID NO: 1327 - RNA, 19 nt, synthetic construct
  source 1..19: mol_type = other RNA
  modified_base 2: mod_base = OTHER; note = 2'-O-methylcytidine-3'-phosphate
  modified_base 3: mod_base = OTHER; note = 2'-O-methylcytidine-3'-phosphate
  modified_base 4: mod_base = OTHER; note = 2'-O-methyluridine-3'-phosphate
  modified_base 9: mod_base = OTHER; note = 2'-O-methyluridine-3'-phosphate
  modified_base 10: mod_base = OTHER; note = 2'-O-methyluridine-3'-phosphate
  modified_base 11: mod_base = OTHER; note = 2'-O-methyluridine-3'-phosphate
  modified_base 13: mod_base = OTHER; note = 2'-O-methyluridine-3'-phosphate
  modified_base 14: mod_base = OTHER; note = 2'-O-methyluridine-3'-phosphate
  modified_base 15: mod_base = OTHER; note = 2'-O-methylcytidine-3'-phosphate
gcctggagtttattcggaa

SEQ ID NO: 1328 - RNA, 21 nt, synthetic construct
  source 1..21: mol_type = other RNA
  modified_base 19: mod_base = OTHER; note = cytidine-3'-phosphorothioate
  modified_base 20: mod_base = OTHER; note = 2'-O-methylcytidine-3'-phosphorothioate
  modified_base 21: mod_base = OTHER; note = 2'-O-methyluridine
ttccgaataaactccaggcct

SEQ ID NO: 1329 - RNA, 20 nt, synthetic construct
  source 1..20: mol_type = other RNA
  modified_base 2: mod_base = OTHER; note = 2'-O-methylcytidine-3'-phosphate
  modified_base 3: mod_base = OTHER; note = 2'-O-methylcytidine-3'-phosphate
  modified_base 4: mod_base = OTHER; note = 2'-O-methyluridine-3'-phosphate
  modified_base 9: mod_base = OTHER; note = 2'-O-methyluridine-3'-phosphate
  modified_base 10: mod_base = OTHER; note = 2'-O-methyluridine-3'-phosphate
  modified_base 11: mod_base = OTHER; note = 2'-O-methyluridine-3'-phosphate
  modified_base 13: mod_base = OTHER; note = 2'-O-methyluridine-3'-phosphate
  modified_base 14: mod_base = OTHER; note = 2'-O-methyluridine-3'-phosphate
  modified_base 15: mod_base = OTHER; note = 2'-O-methylcytidine-3'-phosphate
gcctggagtttattcggaaa

SEQ ID NO: 1330 - RNA, 22 nt, synthetic construct
  source 1..22: mol_type = other RNA
  modified_base 20: mod_base = OTHER; note = cytidine-3'-phosphorothioate
  modified_base 21: mod_base = OTHER; note = 2'-O-methylcytidine-3'-phosphorothioate
  modified_base 22: mod_base = OTHER; note = 2'-O-methyluridine
tttccgaataaactccaggcct

SEQ ID NO: 1331 - RNA, 21 nt, synthetic construct
  source 1..21: mol_type = other RNA
  modified_base 2: mod_base = OTHER; note = 2'-O-methylcytidine-3'-phosphate
  modified_base 3: mod_base = OTHER; note = 2'-O-methylcytidine-3'-phosphate
  modified_base 4: mod_base = OTHER; note = 2'-O-methyluridine-3'-phosphate
  modified_base 9: mod_base = OTHER; note = 2'-O-methyluridine-3'-phosphate
  modified_base 10: mod_base = OTHER; note = 2'-O-methyluridine-3'-phosphate
  modified_base 11: mod_base = OTHER; note = 2'-O-methyluridine-3'-phosphate
  modified_base 13: mod_base = OTHER; note = 2'-O-methyluridine-3'-phosphate
  modified_base 14: mod_base = OTHER; note = 2'-O-methyluridine-3'-phosphate
  modified_base 15: mod_base = OTHER; note = 2'-O-methylcytidine-3'-phosphate
gcctggagtttattcggaaaa

SEQ ID NO: 1332 - RNA, 23 nt, synthetic construct
  source 1..23: mol_type = other RNA
  modified_base 21: mod_base = OTHER; note = cytidine-3'-phosphorothioate
  modified_base 22: mod_base = OTHER; note = 2'-O-methylcytidine-3'-phosphorothioate
  modified_base 23: mod_base = OTHER; note = 2'-O-methyluridine
ttttccgaataaactccaggcct

SEQ ID NO: 1333 - RNA, 22 nt, synthetic construct
  source 1..22: mol_type = other RNA
  modified_base 2: mod_base = OTHER; note = 2'-O-methylcytidine-3'-phosphate
  modified_base 3: mod_base = OTHER; note = 2'-O-methylcytidine-3'-phosphate
  modified_base 4: mod_base = OTHER; note = 2'-O-methyluridine-3'-phosphate
  modified_base 9: mod_base = OTHER; note = 2'-O-methyluridine-3'-phosphate
  modified_base 10: mod_base = OTHER; note = 2'-O-methyluridine-3'-phosphate
  modified_base 11: mod_base = OTHER; note = 2'-O-methyluridine-3'-phosphate
  modified_base 13: mod_base = OTHER; note = 2'-O-methyluridine-3'-phosphate
  modified_base 14: mod_base = OTHER; note = 2'-O-methyluridine-3'-phosphate
  modified_base 15: mod_base = OTHER; note = 2'-O-methylcytidine-3'-phosphate
gcctggagtttattcggaaaag

SEQ ID NO: 1334 - RNA, 24 nt, synthetic construct
  source 1..24: mol_type = other RNA
  modified_base 22: mod_base = OTHER; note = cytidine-3'-phosphorothioate
  modified_base 23: mod_base = OTHER; note = 2'-O-methylcytidine-3'-phosphorothioate
  modified_base 24: mod_base = OTHER; note = 2'-O-methyluridine
cttttccgaataaactccaggcct

SEQ ID NO: 1335 - DNA, 22 bp, synthetic construct
  source 1..22: mol_type = other DNA
  modified_base 1: mod_base = OTHER; note = guanosine-3'-phosphate
  modified_base 2: mod_base = OTHER; note = 2'-O-methylcytidine-3'-phosphate
  modified_base 3: mod_base = OTHER; note = 2'-O-methylcytidine-3'-phosphate
  modified_base 4: mod_base = OTHER; note = 2'-O-methyluridine-3'-phosphate
  modified_base 5: mod_base = OTHER; note = guanosine-3'-phosphate
  modified_base 6: mod_base = OTHER; note = guanosine-3'-phosphate
  modified_base 7: mod_base = OTHER; note = adenosine-3'-phosphate
  modified_base 8: mod_base = OTHER; note = guanosine-3'-phosphate
  modified_base 9: mod_base = OTHER; note = 2'-O-methyluridine-3'-phosphate
  modified_base 10: mod_base = OTHER; note = 2'-O-methyluridine-3'-phosphate
  modified_base 11: mod_base = OTHER; note = 2'-O-methyluridine-3'-phosphate
  modified_base 12: mod_base = OTHER; note = adenosine-3'-phosphate
  modified_base 13: mod_base = OTHER; note = 2'-O-methyluridine-3'-phosphate
  modified_base 14: mod_base = OTHER; note = 2'-O-methyluridine-3'-phosphate
  modified_base 15: mod_base = OTHER; note = 2'-O-methylcytidine-3'-phosphate
  modified_base 16: mod_base = OTHER; note = guanosine-3'-phosphate
  modified_base 17: mod_base = OTHER; note = guanosine-3'-phosphate
  modified_base 18: mod_base = OTHER; note = adenosine-3'-phosphate
  modified_base 19: mod_base = OTHER; note = adenosine-3'-phosphate
  modified_base 22: mod_base = OTHER; note = abasic nucleotide
  misc_feature 1..19: note = RNA
  misc_feature 22: note = RNA
  misc_feature 20..21: note = DNA
gcctggagtttattcggaattn

SEQ ID NO: 1336 - DNA, 22 bp, synthetic construct
  source 1..22: mol_type = other DNA
  modified_base 1: mod_base = OTHER; note = uridine-3'-phosphate
  modified_base 2: mod_base = OTHER; note = uridine-3'-phosphate
  modified_base 3: mod_base = OTHER; note = cytidine-3'-phosphate
  modified_base 4: mod_base = OTHER; note = cytidine-3'-phosphate
  modified_base 5: mod_base = OTHER; note = guanosine-3'-phosphate
  modified_base 6: mod_base = OTHER; note = adenosine-3'-phosphate
  modified_base 7: mod_base = OTHER; note = adenosine-3'-phosphate
  modified_base 8: mod_base = OTHER; note = uridine-3'-phosphate
  modified_base 9: mod_base = OTHER; note = adenosine-3'-phosphate
  modified_base 10: mod_base = OTHER; note = adenosine-3'-phosphate
  modified_base 11: mod_base = OTHER; note = adenosine-3'-phosphate
  modified_base 12: mod_base = OTHER; note = cytidine-3'-phosphate
  modified_base 13: mod_base = OTHER; note = uridine-3'-phosphate
  modified_base 14: mod_base = OTHER; note = cytidine-3'-phosphate
  modified_base 15: mod_base = OTHER; note = cytidine-3'-phosphate
  modified_base 16: mod_base = OTHER; note = adenosine-3'-phosphate
  modified_base 17: mod_base = OTHER; note = guanosine-3'-phosphate
  modified_base 18: mod_base = OTHER; note = guanosine-3'-phosphate
  modified_base 19: mod_base = OTHER; note = cytidine-3'-phosphate
  modified_base 22: mod_base = OTHER; note = abasic nucleotide
  misc_feature 1..19: note = RNA
  misc_feature 22: note = RNA
  misc_feature 20..21: note = DNA
ttccgaataaactccaggcttn

SEQ ID NO: 1337 - DNA, 23 bp, synthetic construct
  source 1..23: mol_type = other DNA
  modified_base 1: mod_base = OTHER; note = guanosine-3'-phosphate
  modified_base 2: mod_base = OTHER; note = 2'-O-methylcytidine-3'-phosphate
  modified_base 3: mod_base = OTHER; note = 2'-O-methylcytidine-3'-phosphate
  modified_base 4: mod_base = OTHER; note = 2'-O-methyluridine-3'-phosphate
  modified_base 5: mod_base = OTHER; note = guanosine-3'-phosphate
  modified_base 6: mod_base = OTHER; note = guanosine-3'-phosphate
  modified_base 7: mod_base = OTHER; note = adenosine-3'-phosphate
  modified_base 8: mod_base = OTHER; note = guanosine-3'-phosphate
  modified_base 9: mod_base = OTHER; note = 2'-O-methyluridine-3'-phosphate
  modified_base 10: mod_base = OTHER; note = 2'-O-methyluridine-3'-phosphate
  modified_base 11: mod_base = OTHER; note = 2'-O-methyluridine-3'-phosphate
  modified_base 12: mod_base = OTHER; note = adenosine-3'-phosphate
  modified_base 13: mod_base = OTHER; note = 2'-O-methyluridine-3'-phosphate
  modified_base 14: mod_base = OTHER; note = 2'-O-methyluridine-3'-phosphate
  modified_base 15: mod_base = OTHER; note = 2'-O-methylcytidine-3'-phosphate
  modified_base 16: mod_base = OTHER; note = guanosine-3'-phosphate
  modified_base 17: mod_base = OTHER; note = guanosine-3'-phosphate
  modified_base 18: mod_base = OTHER; note = adenosine-3'-phosphate
  modified_base 19: mod_base = OTHER; note = adenosine-3'-phosphate
  modified_base 20: mod_base = OTHER; note = adenosine-3'-phosphate
  modified_base 23: mod_base = OTHER; note = abasic nucleotide
  misc_feature 1..20: note = RNA
  misc_feature 23: note = RNA
  misc_feature 21..22: note = DNA
gcctggagtttattcggaaattn

SEQ ID NO: 1338 - DNA, 23 bp, synthetic construct
  source 1..23: mol_type = other DNA
  modified_base 1: mod_base = OTHER; note = uridine-3'-phosphate
  modified_base 2: mod_base = OTHER; note = uridine-3'-phosphate
  modified_base 3: mod_base = OTHER; note = uridine-3'-phosphate
  modified_base 4: mod_base = OTHER; note = cytidine-3'-phosphate
  modified_base 5: mod_base = OTHER; note = cytidine-3'-phosphate
  modified_base 6: mod_base = OTHER; note = guanosine-3'-phosphate
  modified_base 7: mod_base = OTHER; note = adenosine-3'-phosphate
  modified_base 8: mod_base = OTHER; note = adenosine-3'-phosphate
  modified_base 9: mod_base = OTHER; note = 2'-O-methyluridine-3'-phosphate
  modified_base 10: mod_base = OTHER; note = adenosine-3'-phosphate
  modified_base 11: mod_base = OTHER; note = adenosine-3'-phosphate
  modified_base 12: mod_base = OTHER; note = adenosine-3'-phosphate
  modified_base 13: mod_base = OTHER; note = cytidine-3'-phosphate
  modified_base 14: mod_base = OTHER; note = uridine-3'-phosphate
  modified_base 15: mod_base = OTHER; note = cytidine-3'-phosphate
  modified_base 16: mod_base = OTHER; note = cytidine-3'-phosphate
  modified_base 17: mod_base = OTHER; note = adenosine-3'-phosphate
  modified_base 18: mod_base = OTHER; note = guanosine-3'-phosphate
  modified_base 19: mod_base = OTHER; note = guanosine-3'-phosphate
  modified_base 20: mod_base = OTHER; note = cytidine-3'-phosphate
  modified_base 23: mod_base = OTHER; note = abasic nucleotide
  misc_feature 1..20: note = RNA
  misc_feature 23: note = RNA
  misc_feature 21..22: note = DNA
tttccgaataaactccaggcttn

SEQ ID NO: 1339 - DNA, 24 bp, synthetic construct
  source 1..24: mol_type = other DNA
  modified_base 1: mod_base = OTHER; note = guanosine-3'-phosphate
  modified_base 2: mod_base = OTHER; note = 2'-O-methylcytidine-3'-phosphate
  modified_base 3: mod_base = OTHER; note = 2'-O-methylcytidine-3'-phosphate
  modified_base 4: mod_base = OTHER; note = 2'-O-methyluridine-3'-phosphate
  modified_base 5: mod_base = OTHER; note = guanosine-3'-phosphate
  modified_base 6: mod_base = OTHER; note = guanosine-3'-phosphate
  modified_base 7: mod_base = OTHER; note = adenosine-3'-phosphate
  modified_base 8: mod_base = OTHER; note = guanosine-3'-phosphate
  modified_base 9: mod_base = OTHER; note = 2'-O-methyluridine-3'-phosphate
  modified_base 10: mod_base = OTHER; note = 2'-O-methyluridine-3'-phosphate
  modified_base 11: mod_base = OTHER; note = 2'-O-methyluridine-3'-phosphate
  modified_base 12: mod_base = OTHER; note = adenosine-3'-phosphate
  modified_base 13: mod_base = OTHER; note = 2'-O-methyluridine-3'-phosphate
  modified_base 14: mod_base = OTHER; note = 2'-O-methyluridine-3'-phosphate
  modified_base 15: mod_base = OTHER; note = 2'-O-methylcytidine-3'-phosphate
  modified_base 16: mod_base = OTHER; note = guanosine-3'-phosphate
  modified_base 17: mod_base = OTHER; note = guanosine-3'-phosphate
  modified_base 18: mod_base = OTHER; note = adenosine-3'-phosphate
  modified_base 19: mod_base = OTHER; note = adenosine-3'-phosphate
  modified_base 20: mod_base = OTHER; note = adenosine-3'-phosphate
  modified_base 21: mod_base = OTHER; note = adenosine-3'-phosphate
  modified_base 24: mod_base = OTHER; note = abasic nucleotide
  misc_feature 1..21: note = RNA
  misc_feature 24: note = RNA
  misc_feature 22..23: note = DNA
gcctggagtttattcggaaaattn

SEQ ID NO: 1340 - DNA, 24 bp, synthetic construct
  source 1..24: mol_type = other DNA
  modified_base 1: mod_base = OTHER; note = uridine-3'-phosphate
  modified_base 2: mod_base = OTHER; note = uridine-3'-phosphate
  modified_base 3: mod_base = OTHER; note = uridine-3'-phosphate
  modified_base 4: mod_base = OTHER; note = uridine-3'-phosphate
  modified_base 5: mod_base = OTHER; note = cytidine-3'-phosphate
  modified_base 6: mod_base = OTHER; note = cytidine-3'-phosphate
  modified_base 7: mod_base = OTHER; note = guanosine-3'-phosphate
  modified_base 8: mod_base = OTHER; note = adenosine-3'-phosphate
  modified_base 9: mod_base = OTHER; note = adenosine-3'-phosphate
  modified_base 10: mod_base = OTHER; note = uridine-3'-phosphate
  modified_base 11: mod_base = OTHER; note = adenosine-3'-phosphate
  modified_base 12: mod_base = OTHER; note = adenosine-3'-phosphate
  modified_base 13: mod_base = OTHER; note = adenosine-3'-phosphate
  modified_base 14: mod_base = OTHER; note = cytidine-3'-phosphate
  modified_base 15: mod_base = OTHER; note = uridine-3'-phosphate
  modified_base 16: mod_base = OTHER; note = cytidine-3'-phosphate
  modified_base 17: mod_base = OTHER; note = cytidine-3'-phosphate
  modified_base 18: mod_base = OTHER; note = adenosine-3'-phosphate
  modified_base 19: mod_base = OTHER; note = guanosine-3'-phosphate
  modified_base 20: mod_base = OTHER; note = guanosine-3'-phosphate
  modified_base 21: mod_base = OTHER; note = cytidine-3'-phosphate
  modified_base 24: mod_base = OTHER; note = abasic nucleotide
  misc_feature 1..21: note = RNA
  misc_feature 24: note = RNA
  misc_feature 22..23: note = DNA
ttttccgaataaactccaggcttn

SEQ ID NO: 1341 - DNA, 25 bp, synthetic construct
  source 1..25: mol_type = other DNA
  modified_base 1: mod_base = OTHER; note = guanosine-3'-phosphate
  modified_base 2: mod_base = OTHER; note = 2'-O-methylcytidine-3'-phosphate
  modified_base 3: mod_base = OTHER; note = 2'-O-methylcytidine-3'-phosphate
  modified_base 4: mod_base = OTHER; note = 2'-O-methyluridine-3'-phosphate
  modified_base 5: mod_base = OTHER; note = guanosine-3'-phosphate
  modified_base 6: mod_base = OTHER; note = guanosine-3'-phosphate
  modified_base 7: mod_base = OTHER; note = adenosine-3'-phosphate
  modified_base 8: mod_base = OTHER; note = guanosine-3'-phosphate
  modified_base 9: mod_base = OTHER; note = 2'-O-methyluridine-3'-phosphate
  modified_base 10: mod_base = OTHER; note = 2'-O-methyluridine-3'-phosphate
  modified_base 11: mod_base = OTHER; note = 2'-O-methyluridine-3'-phosphate
  modified_base 12: mod_base = OTHER; note = adenosine-3'-phosphate
  modified_base 13: mod_base = OTHER; note = 2'-O-methyluridine-3'-phosphate
  modified_base 14: mod_base = OTHER; note = 2'-O-methyluridine-3'-phosphate
  modified_base 15: mod_base = OTHER; note = 2'-O-methylcytidine-3'-phosphate
  modified_base 16: mod_base = OTHER; note = guanosine-3'-phosphate
  modified_base 17: mod_base = OTHER; note = guanosine-3'-phosphate
  modified_base 18: mod_base = OTHER; note = adenosine-3'-phosphate
  modified_base 19: mod_base = OTHER; note = adenosine-3'-phosphate
  modified_base 20: mod_base = OTHER; note = adenosine-3'-phosphate
  modified_base 21: mod_base = OTHER; note = adenosine-3'-phosphate
  modified_base 22: mod_base = OTHER; note = guanosine-3'-phosphate
  modified_base 25: mod_base = OTHER; note = abasic nucleotide
  misc_feature 1..22: note = RNA
  misc_feature 25: note = RNA
  misc_feature 23..24: note = DNA
gcctggagtttattcggaaaagttn

SEQ ID NO: 1342 - DNA, 25 bp, synthetic construct
  source 1..25: mol_type = other DNA
  modified_base 1: mod_base = OTHER; note = cytidine-3'-phosphate
  modified_base 2: mod_base = OTHER; note = uridine-3'-phosphate
  modified_base 3: mod_base = OTHER; note = uridine-3'-phosphate
  modified_base 4: mod_base = OTHER; note = uridine-3'-phosphate
  modified_base 5: mod_base = OTHER; note = uridine-3'-phosphate
  modified_base 6: mod_base = OTHER; note = cytidine-3'-phosphate
  modified_base 7: mod_base = OTHER; note = cytidine-3'-phosphate
  modified_base 8: mod_base = OTHER; note = guanosine-3'-phosphate
  modified_base 9: mod_base = OTHER; note = adenosine-3'-phosphate
  modified_base 10: mod_base = OTHER; note = adenosine-3'-phosphate
  modified_base 11: mod_base = OTHER; note = uridine-3'-phosphate
  modified_base 12: mod_base = OTHER; note = adenosine-3'-phosphate
  modified_base 13: mod_base = OTHER; note = adenosine-3'-phosphate
  modified_base 14: mod_base = OTHER; note = adenosine-3'-phosphate
  modified_base 15: mod_base = OTHER; note = cytidine-3'-phosphate
  modified_base 16: mod_base = OTHER; note = uridine-3'-phosphate
  modified_base 17: mod_base = OTHER; note = cytidine-3'-phosphate
  modified_base 18: mod_base = OTHER; note = cytidine-3'-phosphate
  modified_base 19: mod_base = OTHER; note = adenosine-3'-phosphate
  modified_base 20: mod_base = OTHER; note = guanosine-3'-phosphate
  modified_base 21: mod_base = OTHER; note = guanosine-3'-phosphate
  modified_base 22: mod_base = OTHER; note = cytidine-3'-phosphate
  modified_base 25: mod_base = OTHER; note = abasic nucleotide
  misc_feature 1..22: note = RNA
  misc_feature 25: note = RNA
  misc_feature 23..24: note = DNA
cttttccgaataaactccaggcttn

SEQ ID NO: 1343 - DNA, 21 bp, synthetic construct
  source 1..21: mol_type = other DNA
  modified_base 1: mod_base = OTHER; note = guanosine-3'-phosphate
  modified_base 2: mod_base = OTHER; note = cytidine-3'-phosphate
  modified_base 3: mod_base = OTHER; note = cytidine-3'-phosphate
  modified_base 4: mod_base = OTHER; note = uridine-3'-phosphate
  modified_base 5: mod_base = OTHER; note = guanosine-3'-phosphate
  modified_base 6: mod_base = OTHER; note = guanosine-3'-phosphate
  modified_base 7: mod_base = OTHER; note = adenosine-3'-phosphate
  modified_base 8: mod_base = OTHER; note = guanosine-3'-phosphate
  modified_base 9: mod_base = OTHER; note = uridine-3'-phosphate
  modified_base 10: mod_base = OTHER; note = uridine-3'-phosphate
  modified_base 11: mod_base = OTHER; note = uridine-3'-phosphate
  modified_base 12: mod_base = OTHER; note = adenosine-3'-phosphate
  modified_base 13: mod_base = OTHER; note = uridine-3'-phosphate
  modified_base 14: mod_base = OTHER; note = uridine-3'-phosphate
  modified_base 15: mod_base = OTHER; note = cytidine-3'-phosphate
  modified_base 16: mod_base = OTHER; note = guanosine-3'-phosphate
  modified_base 17: mod_base = OTHER; note = guanosine-3'-phosphate
  modified_base 18: mod_base = OTHER; note = adenosine-3'-phosphate
  modified_base 19: mod_base = OTHER; note = adenosine-3'-phosphate
  modified_base 20: mod_base = OTHER; note = 2'-deoxythymidine-3'-phosphorothioate
  misc_feature 1..19: note = RNA
  misc_feature 20..21: note = DNA
gcctggagtttattcggaatt

SEQ ID NO: 1344 - RNA, 21 nt, synthetic construct
  source 1..21: mol_type = other RNA
  modified_base 19: mod_base = OTHER; note = cytidine-3'-phosphorothioate
  modified_base 20: mod_base = OTHER; note = 2'-O-methylcytidine-3'-phosphorothioate
  modified_base 21: mod_base = OTHER; note = 2'-O-methyluridine
ttccgaataaactccaggcct

SEQ ID NO: 1345 - DNA, 21 bp, synthetic construct
  source 1..21: mol_type = other DNA
  modified_base 1: mod_base = OTHER; note = guanosine-3'-phosphate
  modified_base 2: mod_base = OTHER; note = 2'-O-methylcytidine-3'-phosphate
  modified_base 3: mod_base = OTHER; note = 2'-O-methylcytidine-3'-phosphate
  modified_base 4: mod_base = OTHER; note = 2'-O-methyluridine-3'-phosphate
  modified_base 5: mod_base = OTHER; note = guanosine-3'-phosphate
  modified_base 6: mod_base = OTHER; note = guanosine-3'-phosphate
  modified_base 7: mod_base = OTHER; note = adenosine-3'-phosphate
  modified_base 8: mod_base = OTHER; note = guanosine-3'-phosphate
  modified_base 9: mod_base = OTHER; note = 2'-O-methyluridine-3'-phosphate
  modified_base 10: mod_base = OTHER; note = 2'-O-methyluridine-3'-phosphate
  modified_base 11: mod_base = OTHER; note = 2'-O-methyluridine-3'-phosphate
  modified_base 12: mod_base = OTHER; note = adenosine-3'-phosphate
  modified_base 13: mod_base = OTHER; note = 2'-O-methyluridine-3'-phosphate
  modified_base 14: mod_base = OTHER; note = 2'-O-methyluridine-3'-phosphate
  modified_base 15: mod_base = OTHER; note = 2'-O-methylcytidine-3'-phosphate
  modified_base 16: mod_base = OTHER; note = guanosine-3'-phosphate
  modified_base 17: mod_base = OTHER; note = guanosine-3'-phosphate
  modified_base 18: mod_base = OTHER; note = adenosine-3'-phosphate
  modified_base 19: mod_base = OTHER; note = adenosine-3'-phosphate
  modified_base 20: mod_base = OTHER; note = 2'-deoxythymidine-3'-phosphorothioate
  misc_feature 1..19: note = RNA
  misc_feature 20..21: note = DNA
gcctggagtttattcggaatt

SEQ ID NO: 1346 - RNA, 21 nt, synthetic construct
  source 1..21: mol_type = other RNA
  modified_base 19: mod_base = OTHER; note = cytidine-3'-phosphorothioate
  modified_base 20: mod_base = OTHER; note = 2'-O-methylcytidine-3'-phosphorothioate
  modified_base 21: mod_base = OTHER; note = 2'-O-methyluridine
ttccgaataaactccaggcct

SEQ ID NO: 1347 - RNA, 19 nt, synthetic construct
  source 1..19: mol_type = other RNA
  modified_base 2: mod_base = OTHER; note = 2'-O-methylcytidine-3'-phosphate
  modified_base 4: mod_base = OTHER; note = 2'-O-methyluridine-3'-phosphate
  modified_base 6: mod_base = OTHER; note = 2'-O-methylguanosine-3'-phosphate
  modified_base 8: mod_base = OTHER; note = 2'-O-methylguanosine-3'-phosphate
  modified_base 10: mod_base = OTHER; note = 2'-O-methyluridine-3'-phosphate
  modified_base 12: mod_base = OTHER; note = 2'-O-methyladenosine-3'-phosphate
  modified_base 14: mod_base = OTHER; note = 2'-O-methyluridine-3'-phosphate
  modified_base 16: mod_base = OTHER; note = 2'-O-methylguanosine-3'-phosphate
  modified_base 18: mod_base = OTHER; note = 2'-O-methyladenosine-3'-phosphate
gcctggagtttattcggaa

SEQ ID NO: 1348 - DNA, 22 bp, synthetic construct
  source 1..22: mol_type = other DNA
  modified_base 1: mod_base = OTHER; note = uridine-3'-phosphate
  modified_base 2: mod_base = OTHER; note = uridine-3'-phosphate
  modified_base 3: mod_base = OTHER; note = cytidine-3'-phosphate
  modified_base 4: mod_base = OTHER; note = cytidine-3'-phosphate
  modified_base 5: mod_base = OTHER; note = guanosine-3'-phosphate
  modified_base 6: mod_base = OTHER; note = adenosine-3'-phosphate
  modified_base 7: mod_base = OTHER; note = adenosine-3'-phosphate
  modified_base 8: mod_base = OTHER; note = uridine-3'-phosphate
  modified_base 9: mod_base = OTHER; note = adenosine-3'-phosphate
  modified_base 10: mod_base = OTHER; note = adenosine-3'-phosphate
  modified_base 11: mod_base = OTHER; note = adenosine-3'-phosphate
  modified_base 12: mod_base = OTHER; note = cytidine-3'-phosphate
  modified_base 13: mod_base = OTHER; note = uridine-3'-phosphate
  modified_base 14: mod_base = OTHER; note = cytidine-3'-phosphate
  modified_base 15: mod_base = OTHER; note = cytidine-3'-phosphate
  modified_base 16: mod_base = OTHER; note = adenosine-3'-phosphate
  modified_base 17: mod_base = OTHER; note = guanosine-3'-phosphate
  modified_base 18: mod_base = OTHER; note = guanosine-3'-phosphate
  modified_base 19: mod_base = OTHER; note = cytidine-3'-phosphate
  modified_base 22: mod_base = OTHER; note = abasic nucleotide
  misc_feature 1..19: note = RNA
  misc_feature 22: note = RNA
  misc_feature 20..21: note = DNA
ttccgaataaactccaggcttn

SEQ ID NO: 1349 - RNA, 19 nt, synthetic construct
  source 1..19: mol_type = other RNA
  modified_base 2: mod_base = OTHER; note = 2'-O-methylcytidine-3'-phosphate
  modified_base 4: mod_base = OTHER; note = 2'-O-methyluridine-3'-phosphate
  modified_base 6: mod_base = OTHER; note = 2'-O-methylguanosine-3'-phosphate
  modified_base 8: mod_base = OTHER; note = 2'-O-methylguanosine-3'-phosphate
  modified_base 10: mod_base = OTHER; note = 2'-O-methyluridine-3'-phosphate
  modified_base 12: mod_base = OTHER; note = 2'-O-methyladenosine-3'-phosphate
  modified_base 14: mod_base = OTHER; note = 2'-O-methyluridine-3'-phosphate
  modified_base 16: mod_base = OTHER; note = 2'-O-methylguanosine-3'-phosphate
  modified_base 18: mod_base = OTHER; note = 2'-O-methyladenosine-3'-phosphate
gcctggagtttattcggaa

SEQ ID NO: 1350 - DNA, 21 bp, synthetic construct
  source 1..21: mol_type = other DNA
  modified_base 1: mod_base = OTHER; note = uridine-3'-phosphate
  modified_base 2: mod_base = OTHER; note = uridine-3'-phosphate
  modified_base 3: mod_base = OTHER; note = cytidine-3'-phosphate
  modified_base 4: mod_base = OTHER; note = cytidine-3'-phosphate
  modified_base 5: mod_base = OTHER; note = guanosine-3'-phosphate
  modified_base 6: mod_base = OTHER; note = adenosine-3'-phosphate
  modified_base 7: mod_base = OTHER; note = adenosine-3'-phosphate
  modified_base 8: mod_base = OTHER; note = uridine-3'-phosphate
  modified_base 9: mod_base = OTHER; note = adenosine-3'-phosphate
  modified_base 10: mod_base = OTHER; note = adenosine-3'-phosphate
  modified_base 11: mod_base = OTHER; note = adenosine-3'-phosphate
  modified_base 12: mod_base = OTHER; note = cytidine-3'-phosphate
  modified_base 13: mod_base = OTHER; note = uridine-3'-phosphate
  modified_base 14: mod_base = OTHER; note = cytidine-3'-phosphate
  modified_base 15: mod_base = OTHER; note = cytidine-3'-phosphate
  modified_base 16: mod_base = OTHER; note = adenosine-3'-phosphate
  modified_base 17: mod_base = OTHER; note = guanosine-3'-phosphate
  modified_base 18: mod_base = OTHER; note = guanosine-3'-phosphate
  modified_base 19: mod_base = OTHER; note = cytidine-3'-phosphate
  modified_base 20: mod_base = OTHER; note = 2'-deoxythymidine-3'-phosphorothioate
  misc_feature 1..19: note = RNA
  misc_feature 20..21: note = DNA
ttccgaataaactccaggctt

SEQ ID NO: 1351 - RNA, 19 nt, synthetic construct
  source 1..19: mol_type = other RNA
  modified_base 2: mod_base = OTHER; note = 2'-O-methylcytidine-3'-phosphate
  modified_base 4: mod_base = OTHER; note = 2'-O-methyluridine-3'-phosphate
  modified_base 6: mod_base = OTHER; note = 2'-O-methylguanosine-3'-phosphate
  modified_base 8: mod_base = OTHER; note = 2'-O-methylguanosine-3'-phosphate
  modified_base 10: mod_base = OTHER; note = 2'-O-methyluridine-3'-phosphate
  modified_base 12: mod_base = OTHER; note = 2'-O-methyladenosine-3'-phosphate
  modified_base 14: mod_base = OTHER; note = 2'-O-methyluridine-3'-phosphate
  modified_base 16: mod_base = OTHER; note = 2'-O-methylguanosine-3'-phosphate
  modified_base 18: mod_base = OTHER; note = 2'-O-methyladenosine-3'-phosphate
gcctggagtttattcggaa

SEQ ID NO: 1352 - DNA, 21 bp, synthetic construct
  source 1..21: mol_type = other DNA
  modified_base 1: mod_base = OTHER; note = uridine-3'-phosphate
  modified_base 2: mod_base = OTHER; note = uridine-3'-phosphate
  modified_base 3: mod_base = OTHER; note = cytidine-3'-phosphate
  modified_base 4: mod_base = OTHER; note = cytidine-3'-phosphate
  modified_base 5: mod_base = OTHER; note = guanosine-3'-phosphate
  modified_base 6: mod_base = OTHER; note = adenosine-3'-phosphate
  modified_base 7: mod_base = OTHER; note = adenosine-3'-phosphate
  modified_base 8: mod_base = OTHER; note = 2'-O-methyluridine-3'-phosphate
  modified_base 9: mod_base = OTHER; note = adenosine-3'-phosphate
  modified_base 10: mod_base = OTHER; note = adenosine-3'-phosphate
  modified_base 11: mod_base = OTHER; note = adenosine-3'-phosphate
  modified_base 12: mod_base = OTHER; note = cytidine-3'-phosphate
  modified_base 13: mod_base = OTHER; note = uridine-3'-phosphate
  modified_base 14: mod_base = OTHER; note = cytidine-3'-phosphate
  modified_base 15: mod_base = OTHER; note = 2'-O-methylcytidine-3'-phosphate
  modified_base 16: mod_base = OTHER; note = adenosine-3'-phosphate
  modified_base 17: mod_base = OTHER; note = guanosine-3'-phosphate
  modified_base 18: mod_base = OTHER; note = guanosine-3'-phosphate
  modified_base 19: mod_base = OTHER; note = cytidine-3'-phosphate
  modified_base 20: mod_base = OTHER; note = 2'-deoxythymidine-3'-phosphorothioate
  misc_feature 1..19: note = RNA
  misc_feature 20..21: note = DNA
ttccgaataaactccaggctt

SEQ ID NO: 1353 - RNA, 19 nt, synthetic construct
  source 1..19: mol_type = other RNA
  modified_base 2: mod_base = OTHER; note = 2'-O-methylcytidine-3'-phosphate
  modified_base 4: mod_base = OTHER; note = 2'-O-methyluridine-3'-phosphate
  modified_base 6: mod_base = OTHER; note = 2'-O-methylguanosine-3'-phosphate
  modified_base 8: mod_base = OTHER; note = 2'-O-methylguanosine-3'-phosphate
  modified_base 10: mod_base = OTHER; note = 2'-O-methyluridine-3'-phosphate
  modified_base 12: mod_base = OTHER; note = 2'-O-methyladenosine-3'-phosphate
  modified_base 14: mod_base = OTHER; note = 2'-O-methyluridine-3'-phosphate
  modified_base 16: mod_base = OTHER; note = 2'-O-methylguanosine-3'-phosphate
  modified_base 18: mod_base = OTHER; note = 2'-O-methyladenosine-3'-phosphate
gcctggagtttattcggaa

SEQ ID NO: 1354 - DNA, 21 bp, synthetic construct
  source 1..21: mol_type = other DNA
  modified_base 1: mod_base = OTHER; note = 2'-O-methyluridine-3'-phosphate
  modified_base 2: mod_base = OTHER; note = uridine-3'-phosphate
  modified_base 3: mod_base = OTHER; note = 2'-O-methylcytidine-3'-phosphate
  modified_base 4: mod_base = OTHER; note = cytidine-3'-phosphate
  modified_base 5: mod_base = OTHER; note = guanosine-3'-phosphate
  modified_base 6: mod_base = OTHER; note = adenosine-3'-phosphate
  modified_base 7: mod_base = OTHER; note = adenosine-3'-phosphate
  modified_base 8: mod_base = OTHER; note = 2'-O-methyluridine-3'-phosphate
  modified_base 9: mod_base = OTHER; note = adenosine-3'-phosphate
  modified_base 10: mod_base = OTHER; note = adenosine-3'-phosphate
  modified_base 11: mod_base = OTHER; note = adenosine-3'-phosphate
  modified_base 12: mod_base = OTHER; note = cytidine-3'-phosphate
  modified_base 13: mod_base = OTHER; note = uridine-3'-phosphate
  modified_base 14: mod_base = OTHER; note = 2'-O-methylcytidine-3'-phosphate
  modified_base 15: mod_base = OTHER; note = 2'-O-methylcytidine-3'-phosphate
  modified_base 16: mod_base = OTHER; note = adenosine-3'-phosphate
  modified_base 17: mod_base = OTHER; note = guanosine-3'-phosphate
  modified_base 18: mod_base = OTHER; note = guanosine-3'-phosphate
  modified_base 19: mod_base = OTHER; note = cytidine-3'-phosphate
  modified_base 20: mod_base = OTHER; note = 2'-deoxythymidine-3'-phosphorothioate
  misc_feature 1..19: note = RNA
  misc_feature 20..21: note = DNA
ttccgaataaactccaggctt

SEQ ID NO: 1355 - RNA, 19 nt, synthetic construct
  source 1..19: mol_type = other RNA
  modified_base 2: mod_base = OTHER; note = 2'-O-methylcytidine-3'-phosphate
  modified_base 4: mod_base = OTHER; note = 2'-O-methyluridine-3'-phosphate
  modified_base 6: mod_base = OTHER; note = 2'-O-methylguanosine-3'-phosphate
  modified_base 8: mod_base = OTHER; note = 2'-O-methylguanosine-3'-phosphate
  modified_base 10: mod_base = OTHER; note = 2'-O-methyluridine-3'-phosphate
  modified_base 12: mod_base = OTHER; note = 2'-O-methyladenosine-3'-phosphate
  modified_base 14: mod_base = OTHER; note = 2'-O-methyluridine-3'-phosphate
  modified_base 16: mod_base = OTHER; note = 2'-O-methylguanosine-3'-phosphate
  modified_base 18: mod_base = OTHER; note = 2'-O-methyladenosine-3'-phosphate
gcctggagtttattcggaa

SEQ ID NO: 1356 - RNA, 19 nt, synthetic construct
  source 1..19: mol_type = other RNA
  modified_base 6: mod_base = OTHER; note = 2'-O-methyladenosine-3'-phosphate
  modified_base 7: mod_base = OTHER; note = 2'-O-methyladenosine-3'-phosphate
  modified_base 10: mod_base = OTHER; note = 2'-O-methyladenosine-3'-phosphate
  modified_base 11: mod_base = OTHER; note = 2'-O-methyladenosine-3'-phosphate
  modified_base 17: mod_base = OTHER; note = 2'-O-methylguanosine-3'-phosphate
  modified_base 18: mod_base = OTHER; note = 2'-O-methylguanosine-3'-phosphate
  modified_base 19: mod_base = OTHER; note = 2'-O-methylcytidine
ttccgaataaactccaggc

SEQ ID NO: 1357 - DNA, 21 bp, synthetic construct
  source 1..21: mol_type = other DNA
  modified_base 1: mod_base = OTHER; note = guanosine-3'-phosphate
  modified_base 2: mod_base = OTHER; note = 2'-O-methylcytidine-3'-phosphate
  modified_base 3: mod_base = OTHER; note = cytidine-3'-phosphate
  modified_base 4: mod_base = OTHER; note = 2'-O-methyluridine-3'-phosphate
  modified_base 5: mod_base = OTHER; note = guanosine-3'-phosphate
  modified_base 6: mod_base = OTHER; note = 2'-O-methylguanosine-3'-phosphate
  modified_base 7: mod_base = OTHER; note = adenosine-3'-phosphate
  modified_base 8: mod_base = OTHER; note = 2'-O-methylguanosine-3'-phosphate
  modified_base 9: mod_base = OTHER; note = uridine-3'-phosphate
  modified_base 10: mod_base = OTHER; note = 2'-O-methyluridine-3'-phosphate
  modified_base 11: mod_base = OTHER; note = uridine-3'-phosphate
  modified_base 12: mod_base = OTHER; note = 2'-O-methyladenosine-3'-phosphate
  modified_base 13: mod_base = OTHER; note = uridine-3'-phosphate
  modified_base 14: mod_base = OTHER; note = 2'-O-methyluridine-3'-phosphate
  modified_base 15: mod_base = OTHER; note = cytidine-3'-phosphate
  modified_base 16: mod_base = OTHER; note = 2'-O-methylguanosine-3'-phosphate
  modified_base 17: mod_base = OTHER; note = guanosine-3'-phosphate
  modified_base 18: mod_base = OTHER; note = 2'-O-methyladenosine-3'-phosphate
  modified_base 19: mod_base = OTHER; note = adenosine-3'-phosphate
  modified_base 20: mod_base = OTHER; note = 2'-deoxythymidine-3'-phosphorothioate
  misc_feature 1..19: note = RNA
  misc_feature 20..21: note = DNA
gcctggagtttattcggaatt

SEQ ID NO: 1358 - DNA, 21 bp, synthetic construct
  source 1..21: mol_type = other DNA
  modified_base 1: mod_base = OTHER; note = uridine-3'-phosphate
  modified_base 2: mod_base = OTHER; note = uridine-3'-phosphate
  modified_base 3: mod_base = OTHER; note = cytidine-3'-phosphate
  modified_base 4: mod_base = OTHER; note = cytidine-3'-phosphate
  modified_base 5: mod_base = OTHER; note = guanosine-3'-phosphate
  modified_base 6: mod_base = OTHER; note = 2'-O-methyladenosine-3'-phosphate
  modified_base 7: mod_base = OTHER; note = 2'-O-methyladenosine-3'-phosphate
  modified_base 8: mod_base = OTHER; note = uridine-3'-phosphate
  modified_base 9: mod_base = OTHER; note = adenosine-3'-phosphate
  modified_base 10: mod_base = OTHER; note = 2'-O-methyladenosine-3'-phosphate
  modified_base 11: mod_base = OTHER; note = 2'-O-methyladenosine-3'-phosphate
  modified_base 12: mod_base = OTHER; note = cytidine-3'-phosphate
  modified_base 13: mod_base = OTHER; note = uridine-3'-phosphate
  modified_base 14: mod_base = OTHER; note = cytidine-3'-phosphate
  modified_base 15: mod_base = OTHER; note = cytidine-3'-phosphate
  modified_base 16: mod_base = OTHER; note = adenosine-3'-phosphate
  modified_base 17: mod_base = OTHER; note = 2'-O-methylguanosine-3'-phosphate
  modified_base 18: mod_base = OTHER; note = 2'-O-methylguanosine-3'-phosphate
  modified_base 19: mod_base = OTHER; note = 2'-O-methylcytidine-3'-phosphate
  modified_base 20: mod_base = OTHER; note = 2'-deoxythymidine-3'-phosphorothioate
  misc_feature 1..19: note = RNA
  misc_feature 20..21: note = DNA
ttccgaataaactccaggctt

SEQ ID NO: 1359 - DNA, 22 bp, synthetic construct
  source 1..22: mol_type = other DNA
  modified_base 1: mod_base = OTHER; note = guanosine-3'-phosphate
  modified_base 2: mod_base = OTHER; note = 2'-O-methylcytidine-3'-phosphate
  modified_base 3: mod_base = OTHER; note = cytidine-3'-phosphate
  modified_base 4: mod_base = OTHER; note = 2'-O-methyluridine-3'-phosphate
  modified_base 5: mod_base = OTHER; note = guanosine-3'-phosphate
  modified_base 6: mod_base = OTHER; note = 2'-O-methylguanosine-3'-phosphate
  modified_base 7: mod_base = OTHER; note = adenosine-3'-phosphate
  modified_base 8: mod_base = OTHER; note = 2'-O-methylguanosine-3'-phosphate
  modified_base 9: mod_base = OTHER; note = uridine-3'-phosphate
  modified_base 10: mod_base = OTHER; note = 2'-O-methyluridine-3'-phosphate
  modified_base 11: mod_base = OTHER; note = uridine-3'-phosphate
  modified_base 12: mod_base = OTHER; note = 2'-O-methyladenosine-3'-phosphate
  modified_base 13: mod_base = OTHER; note = uridine-3'-phosphate
  modified_base 14: mod_base = OTHER; note = 2'-O-methyluridine-3'-phosphate
  modified_base 15: mod_base = OTHER; note = cytidine-3'-phosphate
  modified_base 16: mod_base = OTHER; note = 2'-O-methylguanosine-3'-phosphate
  modified_base 17: mod_base = OTHER; note = guanosine-3'-phosphate
  modified_base 18: mod_base = OTHER; note = 2'-O-methyladenosine-3'-phosphate
  modified_base 19: mod_base = OTHER; note = adenosine-3'-phosphate
  modified_base 22: mod_base = OTHER; note = abasic nucleotide
  misc_feature 1..19: note = RNA
  misc_feature 22: note = RNA
  misc_feature 20..21: note = DNA
gcctggagtttattcggaattn

SEQ ID NO: 1360 - DNA, 22 bp, synthetic construct
  source 1..22: mol_type = other DNA
  modified_base 1: mod_base = OTHER; note = uridine-3'-phosphate
  modified_base 2: mod_base = OTHER; note = uridine-3'-phosphate
  modified_base 3: mod_base = OTHER; note = cytidine-3'-phosphate
  modified_base 4: mod_base = OTHER; note = cytidine-3'-phosphate
  modified_base 5: mod_base = OTHER; note = guanosine-3'-phosphate
  modified_base 6: mod_base = OTHER; note = 2'-O-methyladenosine-3'-phosphate
  modified_base 7: mod_base = OTHER; note = 2'-O-methyladenosine-3'-phosphate
  modified_base 8: mod_base = OTHER; note = uridine-3'-phosphate
  modified_base 9: mod_base = OTHER; note = adenosine-3'-phosphate
  modified_base 10: mod_base = OTHER; note = 2'-O-methyladenosine-3'-phosphate
  modified_base 11: mod_base = OTHER; note = 2'-O-methyladenosine-3'-phosphate
  modified_base 12: mod_base = OTHER; note = cytidine-3'-phosphate
  modified_base 13: mod_base = OTHER; note = uridine-3'-phosphate
  modified_base 14: mod_base = OTHER; note = cytidine-3'-phosphate
  modified_base 15: mod_base = OTHER; note = cytidine-3'-phosphate
  modified_base 16: mod_base = OTHER; note = adenosine-3'-phosphate
  modified_base 17: mod_base = OTHER; note = 2'-O-methylguanosine-3'-phosphate
  modified_base 18: mod_base = OTHER; note = 2'-O-methylguanosine-3'-phosphate
  modified_base 19: mod_base = OTHER; note = 2'-O-methylcytidine-3'-phosphate
  modified_base 22: mod_base = OTHER; note = abasic nucleotide
  misc_feature 1..19: note = RNA
  misc_feature 22: note = RNA
  misc_feature 20..21: note = DNA
ttccgaataaactccaggcttn

SEQ ID NO: 1361 - RNA, 19 nt, synthetic construct
  source 1..19: mol_type = other RNA
  modified_base 2: mod_base = OTHER; note = 2'-O-methylcytidine-3'-phosphate
  modified_base 4: mod_base = OTHER; note = 2'-O-methyluridine-3'-phosphate
  modified_base 6: mod_base = OTHER; note = 2'-O-methylguanosine-3'-phosphate
  modified_base 8: mod_base = OTHER; note = 2'-O-methylguanosine-3'-phosphate
  modified_base 10: mod_base = OTHER; note = 2'-O-methyluridine-3'-phosphate
  modified_base 12: mod_base = OTHER; note = 2'-O-methyladenosine-3'-phosphate
  modified_base 14: mod_base = OTHER; note = 2'-O-methyluridine-3'-phosphate
  modified_base 16: mod_base = OTHER; note = 2'-O-methylguanosine-3'-phosphate
  modified_base 18: mod_base = OTHER; note = 2'-O-methyladenosine-3'-phosphate
gcctggagtttattcggaa

SEQ ID NO: 1362 - RNA, 21 nt, synthetic construct
  source 1..21: mol_type = other RNA
  modified_base 6: mod_base = OTHER; note = 2'-O-methyladenosine-3'-phosphate
  modified_base 7: mod_base = OTHER; note = 2'-O-methyladenosine-3'-phosphate
  modified_base 10: mod_base = OTHER; note = 2'-O-methyladenosine-3'-phosphate
  modified_base 11: mod_base = OTHER; note = 2'-O-methyladenosine-3'-phosphate
  modified_base 17: mod_base = OTHER; note = 2'-O-methylguanosine-3'-phosphate
  modified_base 18: mod_base = OTHER; note = 2'-O-methylguanosine-3'-phosphate
  modified_base 19: mod_base = OTHER; note = 2'-O-methylcytidine-3'-phosphorothioate
  modified_base 20: mod_base = OTHER; note = 2'-O-methylcytidine-3'-phosphorothioate
  modified_base 21: mod_base = OTHER; note = 2'-O-methyluridine
ttccgaataaactccaggcct

SEQ ID NO: 1363 - DNA, 21 bp, synthetic construct
  source 1..21: mol_type = other DNA
  modified_base 1: mod_base = OTHER; note = guanosine-3'-phosphate
  modified_base 2: mod_base = OTHER; note = 2'-O-methylcytidine-3'-phosphate
  modified_base 3: mod_base = OTHER; note = cytidine-3'-phosphate
  modified_base 4: mod_base = OTHER; note = 2'-O-methyluridine-3'-phosphate
  modified_base 5: mod_base = OTHER; note = guanosine-3'-phosphate
  modified_base 6: mod_base = OTHER; note = 2'-O-methylguanosine-3'-phosphate
  modified_base 7: mod_base = OTHER; note = adenosine-3'-phosphate
  modified_base 8: mod_base = OTHER; note = 2'-O-methylguanosine-3'-phosphate
  modified_base 9: mod_base = OTHER; note = uridine-3'-phosphate
  modified_base 10: mod_base = OTHER; note = 2'-O-methyluridine-3'-phosphate
  modified_base 11: mod_base = OTHER; note = uridine-3'-phosphate
  modified_base 12: mod_base = OTHER; note = 2'-O-methyladenosine-3'-phosphate
  modified_base 13: mod_base = OTHER; note = uridine-3'-phosphate
  modified_base 14: mod_base = OTHER; note = 2'-O-methyluridine-3'-phosphate
  modified_base 15: mod_base = OTHER; note = cytidine-3'-phosphate
  modified_base 16: mod_base = OTHER; note = 2'-O-methylguanosine-3'-phosphate
  modified_base 17: mod_base = OTHER; note = guanosine-3'-phosphate
  modified_base 18: mod_base = OTHER; note = 2'-O-methyladenosine-3'-phosphate
  modified_base 19: mod_base = OTHER; note = adenosine-3'-phosphate
  modified_base 20: mod_base = OTHER; note = 2'-deoxythymidine-3'-phosphorothioate
  misc_feature 1..19: note = RNA
  misc_feature 20..21: note = DNA
gcctggagtttattcggaatt

SEQ ID NO: 1364 - DNA, 21 bp, synthetic construct
  source 1..21: mol_type = other DNA
  modified_base 1: mod_base = OTHER; note = uridine-3'-phosphate
  modified_base 2: mod_base = OTHER; note = uridine-3'-phosphate
  modified_base 3: mod_base = OTHER; note = cytidine-3'-phosphate
  modified_base 4: mod_base = OTHER; note = cytidine-3'-phosphate
  modified_base 5: mod_base = OTHER; note = guanosine-3'-phosphate
  modified_base 6: mod_base = OTHER; note = adenosine-3'-phosphate
  modified_base 7: mod_base = OTHER; note = adenosine-3'-phosphate
  modified_base 8: mod_base = OTHER; note = 2'-O-methyluridine-3'-phosphate
  modified_base 9: mod_base = OTHER; note = adenosine-3'-phosphate
  modified_base 10: mod_base = OTHER; note = adenosine-3'-phosphate
  modified_base 11: mod_base = OTHER; note = adenosine-3'-phosphate
  modified_base 12: mod_base = OTHER; note = cytidine-3'-phosphate
  modified_base 13: mod_base = OTHER; note = uridine-3'-phosphate
  modified_base 14: mod_base = OTHER; note = cytidine-3'-phosphate
  modified_base 15: mod_base = OTHER; note = 2'-O-methylcytidine-3'-phosphate
  modified_base 16: mod_base = OTHER; note = adenosine-3'-phosphate
  modified_base 17: mod_base = OTHER; note = guanosine-3'-phosphate
  modified_base 18: mod_base = OTHER; note = guanosine-3'-phosphate
  modified_base 19: mod_base = OTHER; note = cytidine-3'-phosphate
  modified_base 20: mod_base = OTHER; note = 2'-deoxythymidine-3'-phosphorothioate
  misc_feature 1..19: note = RNA
  misc_feature 20..21: note = DNA
ttccgaataaactccaggctt

SEQ ID NO: 1365 - DNA, 22 bp, synthetic construct
  source 1..22: mol_type = other DNA
  modified_base 1: mod_base = OTHER; note = guanosine-3'-phosphate
  modified_base 2: mod_base = OTHER; note = 2'-O-methylcytidine-3'-phosphate
  modified_base 3: mod_base = OTHER; note = cytidine-3'-phosphate
  modified_base 4: mod_base = OTHER; note = 2'-O-methyluridine-3'-phosphate
  modified_base 5: mod_base = OTHER; note = guanosine-3'-phosphate
  modified_base 6: mod_base = OTHER; note = 2'-O-methylguanosine-3'-phosphate
  modified_base 7: mod_base = OTHER; note = adenosine-3'-phosphate
  modified_base 8: mod_base = OTHER; note = 2'-O-methylguanosine-3'-phosphate
  modified_base 9: mod_base = OTHER; note = uridine-3'-phosphate
  modified_base 10: mod_base = OTHER; note = 2'-O-methyluridine-3'-phosphate
  modified_base 11: mod_base = OTHER; note = uridine-3'-phosphate
  modified_base 12: mod_base = OTHER; note = 2'-O-methyladenosine-3'-phosphate
  modified_base 13: mod_base = OTHER; note = uridine-3'-phosphate
  modified_base 14: mod_base = OTHER; note = 2'-O-methyluridine-3'-phosphate
  modified_base 15: mod_base = OTHER; note = cytidine-3'-phosphate
  modified_base 16: mod_base = OTHER; note = 2'-O-methylguanosine-3'-phosphate
  modified_base 17: mod_base = OTHER; note = guanosine-3'-phosphate
  modified_base 18: mod_base = OTHER; note = 2'-O-methyladenosine-3'-phosphate
  modified_base 19: mod_base = OTHER; note = adenosine-3'-phosphate
  modified_base 22: mod_base = OTHER; note = abasic nucleotide
  misc_feature 1..19: note = RNA
  misc_feature 22: note = RNA
  misc_feature 20..21: note = DNA
gcctggagtttattcggaattn

SEQ ID NO: 1366 - DNA, 22 bp, synthetic construct
  source 1..22: mol_type = other DNA
  modified_base 1: mod_base = OTHER; note = uridine-3'-phosphate
  modified_base 2: mod_base = OTHER; note = uridine-3'-phosphate
  modified_base 3: mod_base = OTHER; note = cytidine-3'-phosphate
  modified_base 4: mod_base = OTHER; note = cytidine-3'-phosphate
  modified_base 5: mod_base = OTHER; note = guanosine-3'-phosphate
  modified_base 6: mod_base = OTHER; note = adenosine-3'-phosphate
  modified_base 7: mod_base = OTHER; note = adenosine-3'-phosphate
  modified_base 8: mod_base = OTHER; note = 2'-O-methyluridine-3'-phosphate
  modified_base 9: mod_base = OTHER; note = adenosine-3'-phosphate
  modified_base 10: mod_base = OTHER; note = adenosine-3'-phosphate
  modified_base 11: mod_base = OTHER; note = adenosine-3'-phosphate
  modified_base 12: mod_base = OTHER; note = cytidine-3'-phosphate
  modified_base 13: mod_base = OTHER; note = uridine-3'-phosphate
  modified_base 14: mod_base = OTHER; note = cytidine-3'-phosphate
  modified_base 15: mod_base = OTHER; note = 2'-O-methylcytidine-3'-phosphate
  modified_base 16: mod_base = OTHER; note = adenosine-3'-phosphate
  modified_base 17: mod_base = OTHER; note = guanosine-3'-phosphate
  modified_base 18: mod_base = OTHER; note = guanosine-3'-phosphate
  modified_base 19: mod_base = OTHER; note = cytidine-3'-phosphate
  modified_base 22: mod_base = OTHER; note = abasic nucleotide
  misc_feature 1..19: note = RNA
  misc_feature 22: note = RNA
  misc_feature 20..21: note = DNA
ttccgaataaactccaggcttn

SEQ ID NO: 1367 - RNA, 19 nt, synthetic construct
  source 1..19: mol_type = other RNA
  modified_base 2: mod_base = OTHER; note = 2'-O-methylcytidine-3'-phosphate
  modified_base 4: mod_base = OTHER; note = 2'-O-methyluridine-3'-phosphate
  modified_base 6: mod_base = OTHER; note = 2'-O-methylguanosine-3'-phosphate
  modified_base 8: mod_base = OTHER; note = 2'-O-methylguanosine-3'-phosphate
  modified_base 10: mod_base = OTHER; note = 2'-O-methyluridine-3'-phosphate
  modified_base 12: mod_base = OTHER; note = 2'-O-methyladenosine-3'-phosphate
  modified_base 14: mod_base = OTHER; note = 2'-O-methyluridine-3'-phosphate
  modified_base 16: mod_base = OTHER; note = 2'-O-methylguanosine-3'-phosphate
  modified_base 18: mod_base = OTHER; note = 2'-O-methyladenosine-3'-phosphate
gcctggagtttattcggaa

SEQ ID NO: 1368 - RNA, 21 nt, synthetic construct
  source 1..21: mol_type = other RNA
  modified_base 8: mod_base = OTHER; note = 2'-O-methyluridine-3'-phosphate
  modified_base 15: mod_base = OTHER; note = 2'-O-methylcytidine-3'-phosphate
  modified_base 19: mod_base = OTHER; note = cytidine-3'-phosphorothioate
  modified_base 20: mod_base = OTHER; note = 2'-O-methylcytidine-3'-phosphorothioate
  modified_base 21: mod_base = OTHER; note = 2'-O-methyluridine
ttccgaataaactccaggcct

SEQ ID NO: 1369 - DNA, 21 bp, synthetic construct
  source 1..21: mol_type = other DNA
  modified_base 1: mod_base = OTHER; note = guanosine-3'-phosphate
  modified_base 2: mod_base = OTHER; note = 2'-O-methylcytidine-3'-phosphate
  modified_base 3: mod_base = OTHER; note = cytidine-3'-phosphate
  modified_base 4: mod_base = OTHER; note = 2'-O-methyluridine-3'-phosphate
  modified_base 5: mod_base = OTHER; note = guanosine-3'-phosphate
  modified_base 6: mod_base = OTHER; note = 2'-O-methylguanosine-3'-phosphate
  modified_base 7: mod_base = OTHER; note = adenosine-3'-phosphate
  modified_base 8: mod_base = OTHER; note = 2'-O-methylguanosine-3'-phosphate
  modified_base 9: mod_base = OTHER; note = uridine-3'-phosphate
  modified_base 10: mod_base = OTHER; note = 2'-O-methyluridine-3'-phosphate
  modified_base 11: mod_base = OTHER; note = uridine-3'-phosphate
  modified_base 12: mod_base = OTHER; note = 2'-O-methyladenosine-3'-phosphate
  modified_base 13: mod_base = OTHER; note = uridine-3'-phosphate
  modified_base 14: mod_base = OTHER; note = 2'-O-methyluridine-3'-phosphate
  modified_base 15: mod_base = OTHER; note = cytidine-3'-phosphate
  modified_base 16: mod_base = OTHER; note = 2'-O-methylguanosine-3'-phosphate
  modified_base 17: mod_base = OTHER; note = guanosine-3'-phosphate
  modified_base 18: mod_base = OTHER; note = 2'-O-methyladenosine-3'-phosphate
  modified_base 19: mod_base = OTHER; note = adenosine-3'-phosphate
  modified_base 20: mod_base = OTHER; note = 2'-deoxythymidine-3'-phosphorothioate
  misc_feature 1..19: note = RNA
  misc_feature 20..21: note = DNA
gcctggagtttattcggaatt

SEQ ID NO: 1370 - DNA, 21 bp, synthetic construct
  source 1..21: mol_type = other DNA
  modified_base 1: mod_base = OTHER; note = uridine-3'-phosphate
  modified_base 2: mod_base = OTHER; note = uridine-3'-phosphate
  modified_base 3: mod_base = OTHER; note = cytidine-3'-phosphate
  modified_base 4: mod_base = OTHER; note = cytidine-3'-phosphate
  modified_base 5: mod_base = OTHER; note = guanosine-3'-phosphate
  modified_base 6: mod_base = OTHER; note = adenosine-3'-phosphate
  modified_base 7: mod_base = OTHER; note = adenosine-3'-phosphate
  modified_base 8: mod_base = OTHER; note = uridine-3'-phosphate
  modified_base 9: mod_base = OTHER; note = adenosine-3'-phosphate
  modified_base 10: mod_base = OTHER; note = adenosine-3'-phosphate
  modified_base 11: mod_base = OTHER; note = adenosine-3'-phosphate
  modified_base 12: mod_base = OTHER; note = cytidine-3'-phosphate
  modified_base 13: mod_base = OTHER; note = uridine-3'-phosphate
  modified_base 14: mod_base = OTHER; note = cytidine-3'-phosphate
  modified_base 15: mod_base = OTHER; note = cytidine-3'-phosphate
  modified_base 16: mod_base = OTHER; note = adenosine-3'-phosphate
  modified_base 17: mod_base = OTHER; note = guanosine-3'-phosphate
  modified_base 18: mod_base = OTHER; note = guanosine-3'-phosphate
  modified_base 19: mod_base = OTHER; note = cytidine-3'-phosphate
  modified_base 20: mod_base = OTHER; note = 2'-deoxythymidine-3'-phosphorothioate
  misc_feature 1..19: note = RNA
  misc_feature 20..21: note = DNA
ttccgaataaactccaggctt

SEQ ID NO: 1371 - DNA, 22 bp, synthetic construct
  source 1..22: mol_type = other DNA
  modified_base 1: mod_base = OTHER; note = guanosine-3'-phosphate
  modified_base 2: mod_base = OTHER; note = 2'-O-methylcytidine-3'-phosphate
  modified_base 3: mod_base = OTHER; note = cytidine-3'-phosphate
  modified_base 4: mod_base = OTHER; note = 2'-O-methyluridine-3'-phosphate
  modified_base 5: mod_base = OTHER; note = guanosine-3'-phosphate
  modified_base 6: mod_base = OTHER; note = 2'-O-methylguanosine-3'-phosphate
  modified_base 7: mod_base = OTHER; note = adenosine-3'-phosphate
  modified_base 8: mod_base = OTHER; note = 2'-O-methylguanosine-3'-phosphate
  modified_base 9: mod_base = OTHER; note = uridine-3'-phosphate
  modified_base 10: mod_base = OTHER; note = 2'-O-methyluridine-3'-phosphate
  modified_base 11: mod_base = OTHER; note = uridine-3'-phosphate
  modified_base 12: mod_base = OTHER; note = 2'-O-methyladenosine-3'-phosphate
  modified_base 13: mod_base = OTHER; note = uridine-3'-phosphate
  modified_base 14: mod_base = OTHER; note = 2'-O-methyluridine-3'-phosphate
  modified_base 15: mod_base = OTHER; note = cytidine-3'-phosphate
  modified_base 16: mod_base = OTHER; note = 2'-O-methylguanosine-3'-phosphate
  modified_base 17: mod_base = OTHER; note = guanosine-3'-phosphate
  modified_base 18: mod_base = OTHER; note = 2'-O-methyladenosine-3'-phosphate
  modified_base 19: mod_base = OTHER; note = adenosine-3'-phosphate
  modified_base 22: mod_base = OTHER; note = abasic nucleotide
  misc_feature 1..19: note = RNA
  misc_feature 22: note = RNA
  misc_feature 20..21: note = DNA
gcctggagtttattcggaattn

SEQ ID NO: 1372 - DNA, 22 bp, synthetic construct
  source 1..22: mol_type = other DNA
  modified_base 1: mod_base = OTHER; note = uridine-3'-phosphate
  modified_base 2: mod_base = OTHER; note = uridine-3'-phosphate
  modified_base 3: mod_base = OTHER; note = cytidine-3'-phosphate
  modified_base 4: mod_base = OTHER; note = cytidine-3'-phosphate
  modified_base 5: mod_base = OTHER; note = guanosine-3'-phosphate
  modified_base 6: mod_base = OTHER; note = adenosine-3'-phosphate
  modified_base 7: mod_base = OTHER; note = adenosine-3'-phosphate
  modified_base 8: mod_base = OTHER; note = uridine-3'-phosphate
  modified_base 9: mod_base = OTHER; note = adenosine-3'-phosphate
  modified_base 10: mod_base = OTHER; note = adenosine-3'-phosphate
  modified_base 11: mod_base = OTHER; note = adenosine-3'-phosphate
  modified_base 12: mod_base = OTHER; note = cytidine-3'-phosphate
  modified_base 13: mod_base = OTHER; note = uridine-3'-phosphate
  modified_base 14: mod_base = OTHER; note = cytidine-3'-phosphate
  modified_base 15: mod_base = OTHER; note = cytidine-3'-phosphate
  modified_base 16: mod_base = OTHER; note = adenosine-3'-phosphate
  modified_base 17: mod_base = OTHER; note = guanosine-3'-phosphate
  modified_base 18: mod_base = OTHER; note = guanosine-3'-phosphate
  modified_base 19: mod_base = OTHER; note = cytidine-3'-phosphate
  modified_base 22: mod_base = OTHER; note = abasic nucleotide
  misc_feature 1..19: note = RNA
  misc_feature 22: note = RNA
  misc_feature 20..21: note = DNA
ttccgaataaactccaggcttn

SEQ ID NO: 1373 - RNA, 19 nt, synthetic construct
  source 1..19: mol_type = other RNA
  modified_base 2: mod_base = OTHER; note = 2'-O-methylcytidine-3'-phosphate
  modified_base 4: mod_base = OTHER; note = 2'-O-methyluridine-3'-phosphate
  modified_base 6: mod_base = OTHER; note = 2'-O-methylguanosine-3'-phosphate
  modified_base 8: mod_base = OTHER; note = 2'-O-methylguanosine-3'-phosphate
  modified_base 10: mod_base = OTHER; note = 2'-O-methyluridine-3'-phosphate
  modified_base 12: mod_base = OTHER; note = 2'-O-methyladenosine-3'-phosphate
  modified_base 14: mod_base = OTHER; note = 2'-O-methyluridine-3'-phosphate
  modified_base 16: mod_base = OTHER; note = 2'-O-methylguanosine-3'-phosphate
  modified_base 18: mod_base = OTHER; note = 2'-O-methyladenosine-3'-phosphate
gcctggagtttattcggaa

SEQ ID NO: 1374 - RNA, 21 nt, synthetic construct
  source 1..21: mol_type = other RNA
  modified_base 19: mod_base = OTHER; note = cytidine-3'-phosphorothioate
  modified_base 20: mod_base = OTHER; note = 2'-O-methylcytidine-3'-phosphorothioate
  modified_base 21: mod_base = OTHER; note = 2'-O-methyluridine
ttccgaataaactccaggcct

SEQ ID NO: 1375 - RNA, 19 nt, synthetic construct
  source 1..19: mol_type = other RNA
  modified_base 1: mod_base = OTHER; note = 2'-deoxy-2'-fluoroguanosine-3'-phosphate
  modified_base 2: mod_base = OTHER; note = 2'-O-methylcytidine-3'-phosphate
  modified_base 3: mod_base = OTHER; note = 2'-deoxy-2'-fluorocytidine-3'-phosphate
  modified_base 4: mod_base = OTHER; note = 2'-O-methyluridine-3'-phosphate
  modified_base 5: mod_base = OTHER; note = 2'-deoxy-2'-fluoroguanosine-3'-phosphate
  modified_base 6: mod_base = OTHER; note = 2'-O-methylguanosine-3'-phosphate
  modified_base 7: mod_base = OTHER; note = 2'-deoxy-2'-fluoroadenosine-3'-phosphate
  modified_base 8: mod_base = OTHER; note = 2'-O-methylguanosine-3'-phosphate
  modified_base 9: mod_base = OTHER; note = 2'-deoxy-2'-fluorouridine-3'-phosphate
  modified_base 10: mod_base = OTHER; note = 2'-O-methyluridine-3'-phosphate
  modified_base 11: mod_base = OTHER; note = 2'-deoxy-2'-fluorouridine-3'-phosphate
  modified_base 12: mod_base = OTHER; note = 2'-O-methyladenosine-3'-phosphate
  modified_base 13: mod_base = OTHER; note = 2'-deoxy-2'-fluorouridine-3'-phosphate
  modified_base 14: mod_base = OTHER; note = 2'-O-methyluridine-3'-phosphate
  modified_base 15: mod_base = OTHER; note = 2'-deoxy-2'-fluorocytidine-3'-phosphate
  modified_base 16: mod_base = OTHER; note = 2'-O-methylguanosine-3'-phosphate
  modified_base 17: mod_base = OTHER; note = 2'-deoxy-2'-fluoroguanosine-3'-phosphate
  modified_base 18: mod_base = OTHER; note = 2'-O-methyladenosine-3'-phosphate
  modified_base 19: mod_base = OTHER; note = 2'-deoxy-2'-fluoroadenosine
gcctggagtttattcggaa

SEQ ID NO: 1376 - RNA, 19 nt, synthetic construct
  source 1..19: mol_type = other RNA
  modified_base 1: mod_base = OTHER; note = 2'-O-methyluridine-3'-phosphate 5'phosphate
  modified_base 2: mod_base = OTHER; note = 2'-deoxy-2'-fluorouridine-3'-phosphate
  modified_base 3: mod_base = OTHER; note = 2'-O-methylcytidine-3'-phosphate
  modified_base 4: mod_base = OTHER; note = 2'-deoxy-2'-fluorocytidine-3'-phosphate
  modified_base 5: mod_base = OTHER; note = 2'-O-methylguanosine-3'-phosphate
  modified_base 6: mod_base = OTHER; note = 2'-deoxy-2'-fluoroadenosine-3'-phosphate
  modified_base 7: mod_base = OTHER; note = 2'-O-methyladenosine-3'-phosphate
  modified_base 8: mod_base = OTHER; note = 2'-deoxy-2'-fluorouridine-3'-phosphate
  modified_base 9: mod_base = OTHER; note = 2'-O-methyladenosine-3'-phosphate
  modified_base 10: mod_base = OTHER; note = 2'-deoxy-2'-fluoroadenosine-3'-phosphate
  modified_base 11: mod_base = OTHER; note = 2'-O-methyladenosine-3'-phosphate
  modified_base 12: mod_base = OTHER; note = 2'-deoxy-2'-fluorocytidine-3'-phosphate
  modified_base 13: mod_base = OTHER; note = 2'-O-methyluridine-3'-phosphate
  modified_base 14: mod_base = OTHER; note = 2'-deoxy-2'-fluorocytidine-3'-phosphate
  modified_base 15: mod_base = OTHER; note = 2'-O-methylcytidine-3'-phosphate
  modified_base 16: mod_base = OTHER; note = 2'-deoxy-2'-fluoroadenosine-3'-phosphate
  modified_base 17: mod_base = OTHER; note = 2'-O-methylguanosine-3'-phosphate
  modified_base 18: mod_base = OTHER; note = 2'-deoxy-2'-fluoroguanosine-3'-phosphate
  modified_base 19: mod_base = OTHER; note = 2'-O-methylcytidine
ttccgaataaactccaggc

SEQ ID NO: 1377 - RNA, 19 nt, synthetic construct
  source 1..19: mol_type = other RNA
  modified_base 2: mod_base = OTHER; note = 2'-O-methylcytidine-3'-phosphate
  modified_base 4: mod_base = OTHER; note = 2'-O-methyluridine-3'-phosphate
  modified_base 6: mod_base = OTHER; note = 2'-O-methylguanosine-3'-phosphate
  modified_base 8: mod_base = OTHER; note = 2'-O-methylguanosine-3'-phosphate
  modified_base 10: mod_base = OTHER; note = 2'-O-methyluridine-3'-phosphate
  modified_base 12: mod_base = OTHER; note = 2'-O-methyladenosine-3'-phosphate
  modified_base 14: mod_base = OTHER; note = 2'-O-methyluridine-3'-phosphate
  modified_base 16: mod_base = OTHER; note = 2'-O-methylguanosine-3'-phosphate
  modified_base 18: mod_base = OTHER; note = 2'-O-methyladenosine-3'-phosphate
gcctggagtttattcggaa

SEQ ID NO: 1378 - RNA, 19 nt, synthetic construct
  source 1..19: mol_type = other RNA
  modified_base 1: mod_base = OTHER; note = 2'-O-methyluridine-3'-phosphate 5'phosphate
  modified_base 2: mod_base = OTHER; note = 2'-deoxy-2'-fluorouridine-3'-phosphate
  modified_base 3: mod_base = OTHER; note = 2'-O-methylcytidine-3'-phosphate
  modified_base 4: mod_base = OTHER; note = 2'-deoxy-2'-fluorocytidine-3'-phosphate
  modified_base 5: mod_base = OTHER; note = 2'-O-methylguanosine-3'-phosphate
  modified_base 6: mod_base = OTHER; note = 2'-deoxy-2'-fluoroadenosine-3'-phosphate
  modified_base 7: mod_base = OTHER; note = 2'-O-methyladenosine-3'-phosphate
  modified_base 8: mod_base = OTHER; note = 2'-deoxy-2'-fluorouridine-3'-phosphate
  modified_base 9: mod_base = OTHER; note = 2'-O-methyladenosine-3'-phosphate
  modified_base 10: mod_base = OTHER; note = 2'-deoxy-2'-fluoroadenosine-3'-phosphate
  modified_base 11: mod_base = OTHER; note = 2'-O-methyladenosine-3'-phosphate
  modified_base 12: mod_base = OTHER; note = 2'-deoxy-2'-fluorocytidine-3'-phosphate
  modified_base 13: mod_base = OTHER; note = 2'-O-methyluridine-3'-phosphate
  modified_base 14: mod_base = OTHER; note = 2'-deoxy-2'-fluorocytidine-3'-phosphate
  modified_base 15: mod_base = OTHER; note = 2'-O-methylcytidine-3'-phosphate
  modified_base 16: mod_base = OTHER; note = 2'-deoxy-2'-fluoroadenosine-3'-phosphate
  modified_base 17: mod_base = OTHER; note = 2'-O-methylguanosine-3'-phosphate
  modified_base 18: mod_base = OTHER; note = 2'-deoxy-2'-fluoroguanosine-3'-phosphate
  modified_base 19: mod_base = OTHER; note = 2'-O-methylcytidine
ttccgaataaactccaggc

SEQ ID NO: 1379 - RNA, 19 nt, synthetic construct
  source 1..19: mol_type = other RNA
  modified_base 2: mod_base = OTHER; note = 2'-O-methylcytidine-3'-phosphate
  modified_base 3: mod_base = OTHER; note = 2'-O-methylcytidine-3'-phosphate
  modified_base 4: mod_base = OTHER; note = 2'-O-methyluridine-3'-phosphate
  modified_base 9: mod_base = OTHER; note = 2'-O-methyluridine-3'-phosphate
  modified_base 10: mod_base = OTHER; note = 2'-O-methyluridine-3'-phosphate
  modified_base 11: mod_base = OTHER; note = 2'-O-methyluridine-3'-phosphate
  modified_base 13: mod_base = OTHER; note = 2'-O-methyluridine-3'-phosphate
  modified_base 14: mod_base = OTHER; note = 2'-O-methyluridine-3'-phosphate
  modified_base 15: mod_base = OTHER; note = 2'-O-methylcytidine-3'-phosphate
gcctggagtttattcggaa

SEQ ID NO: 1380 - RNA, 19 nt, synthetic construct
  source 1..19: mol_type = other RNA
  modified_base 1: mod_base = OTHER; note = 2'-O-methyluridine-3'-phosphate 5'phosphate
  modified_base 2: mod_base = OTHER; note = 2'-deoxy-2'-fluorouridine-3'-phosphate
  modified_base 3: mod_base = OTHER; note = 2'-O-methylcytidine-3'-phosphate
  modified_base 4: mod_base = OTHER; note = 2'-deoxy-2'-fluorocytidine-3'-phosphate
  modified_base 5: mod_base = OTHER; note = 2'-O-methylguanosine-3'-phosphate
  modified_base 6: mod_base = OTHER; note = 2'-deoxy-2'-fluoroadenosine-3'-phosphate
  modified_base 7: mod_base = OTHER; note = 2'-O-methyladenosine-3'-phosphate
  modified_base 8: mod_base = OTHER; note = 2'-deoxy-2'-fluorouridine-3'-phosphate
  modified_base 9: mod_base = OTHER; note = 2'-O-methyladenosine-3'-phosphate
  modified_base 10: mod_base = OTHER; note = 2'-deoxy-2'-fluoroadenosine-3'-phosphate
  modified_base 11: mod_base = OTHER; note = 2'-O-methyladenosine-3'-phosphate
  modified_base 12: mod_base = OTHER; note = 2'-deoxy-2'-fluorocytidine-3'-phosphate
  modified_base 13: mod_base = OTHER; note = 2'-O-methyluridine-3'-phosphate
  modified_base 14: mod_base = OTHER; note = 2'-deoxy-2'-fluorocytidine-3'-phosphate
  modified_base 15: mod_base = OTHER; note = 2'-O-methylcytidine-3'-phosphate
  modified_base 16: mod_base = OTHER; note = 2'-deoxy-2'-fluoroadenosine-3'-phosphate
  modified_base 17: mod_base = OTHER; note = 2'-O-methylguanosine-3'-phosphate
  modified_base 18: mod_base = OTHER; note = 2'-deoxy-2'-fluoroguanosine-3'-phosphate
  modified_base 19: mod_base = OTHER; note = 2'-O-methylcytidine
ttccgaataaactccaggc

SEQ ID NO: 1381 - DNA, 21 bp, synthetic construct
  source 1..21: mol_type = other DNA
  modified_base 1: mod_base = OTHER; note = 2'-deoxy-2'-fluoroguanosine-3'-phosphate
  modified_base 2: mod_base = OTHER; note = 2'-O-methylcytidine-3'-phosphate
  modified_base 3: mod_base = OTHER; note = 2'-deoxy-2'-fluorocytidine-3'-phosphate
  modified_base 4: mod_base = OTHER; note = 2'-O-methyluridine-3'-phosphate
  modified_base 5: mod_base = OTHER; note = 2'-deoxy-2'-fluoroguanosine-3'-phosphate
  modified_base 6: mod_base = OTHER; note = 2'-O-methylguanosine-3'-phosphate
  modified_base 7: mod_base = OTHER; note = 2'-deoxy-2'-fluoroadenosine-3'-phosphate
  modified_base 8: mod_base = OTHER; note = 2'-O-methylguanosine-3'-phosphate
  modified_base 9: mod_base = OTHER; note = 2'-deoxy-2'-fluorouridine-3'-phosphate
  modified_base 10: mod_base = OTHER; note = 2'-O-methyluridine-3'-phosphate
  modified_base 11: mod_base = OTHER; note = 2'-deoxy-2'-fluorouridine-3'-phosphate
  modified_base 12: mod_base = OTHER; note = 2'-O-methyladenosine-3'-phosphate
  modified_base 13: mod_base = OTHER; note = 2'-deoxy-2'-fluorouridine-3'-phosphate
  modified_base 14: mod_base = OTHER; note = 2'-O-methyluridine-3'-phosphate
  modified_base 15: mod_base = OTHER; note = 2'-deoxy-2'-fluorocytidine-3'-phosphate
  modified_base 16: mod_base = OTHER; note = 2'-O-methylguanosine-3'-phosphate
  modified_base 17: mod_base = OTHER; note = 2'-deoxy-2'-fluoroguanosine-3'-phosphate
  modified_base 18: mod_base = OTHER; note = 2'-O-methyladenosine-3'-phosphate
  modified_base 19: mod_base = OTHER; note = 2'-deoxy-2'-fluoroadenosine-3'-phosphate
  modified_base 20: mod_base = OTHER; note = 2'-deoxythymidine-3'-phosphorothioate
  misc_feature 1..19: note = RNA
  misc_feature 20..21: note = DNA
gcctggagtttattcggaatt

SEQ ID NO: 1382 - DNA, 21 bp, synthetic construct
  source 1..21: mol_type = other DNA
  modified_base 1: mod_base = OTHER; note = 2'-O-methyluridine-3'-phosphate 5'phosphate
  modified_base 2: mod_base = OTHER; note = 2'-deoxy-2'-fluorouridine-3'-phosphate
  modified_base 3: mod_base = OTHER; note = 2'-O-methylcytidine-3'-phosphate
  modified_base 4: mod_base = OTHER; note = 2'-deoxy-2'-fluorocytidine-3'-phosphate
  modified_base 5: mod_base = OTHER; note = 2'-O-methylguanosine-3'-phosphate
  modified_base 6: mod_base = OTHER; note = 2'-deoxy-2'-fluoroadenosine-3'-phosphate
  modified_base 7: mod_base = OTHER; note = 2'-O-methyladenosine-3'-phosphate
  modified_base 8: mod_base = OTHER; note = 2'-deoxy-2'-fluorouridine-3'-phosphate
  modified_base 9: mod_base = OTHER; note = 2'-O-methyladenosine-3'-phosphate
  modified_base 10: mod_base = OTHER; note = 2'-deoxy-2'-fluoroadenosine-3'-phosphate
  modified_base 11: mod_base = OTHER; note = 2'-O-methyladenosine-3'-phosphate
  modified_base 12: mod_base = OTHER; note = 2'-deoxy-2'-fluorocytidine-3'-phosphate
  modified_base 13: mod_base = OTHER; note = 2'-O-methyluridine-3'-phosphate
  modified_base 14: mod_base = OTHER; note = 2'-deoxy-2'-fluorocytidine-3'-phosphate
  modified_base 15: mod_base = OTHER; note = 2'-O-methylcytidine-3'-phosphate
  modified_base 16: mod_base = OTHER; note = 2'-deoxy-2'-fluoroadenosine-3'-phosphate
  modified_base 17: mod_base = OTHER; note = 2'-O-methylguanosine-3'-phosphate
  modified_base 18: mod_base = OTHER; note = 2'-deoxy-2'-fluoroguanosine-3'-phosphate
  modified_base 19: mod_base = OTHER; note = 2'-O-methylcytidine-3'-phosphate
  modified_base 20: mod_base = OTHER; note = 2'-deoxythymidine-3'-phosphorothioate
  misc_feature 1..19: note = RNA
  misc_feature 20..21: note = DNA
ttccgaataaactccaggctt

SEQ ID NO: 1383 - DNA, 21 bp, synthetic construct
  source 1..21: mol_type = other DNA
  modified_base 1: mod_base = OTHER; note = 2'-deoxy-2'-fluoroguanosine-3'-phosphate
  modified_base 2: mod_base = OTHER; note = 2'-O-methylcytidine-3'-phosphate
  modified_base 3: mod_base = OTHER; note = 2'-deoxy-2'-fluorocytidine-3'-phosphate
  modified_base 4: mod_base = OTHER; note = 2'-O-methyluridine-3'-phosphate
  modified_base 5: mod_base = OTHER; note = 2'-deoxy-2'-fluoroguanosine-3'-phosphate
  modified_base 6: mod_base = OTHER; note = 2'-O-methylguanosine-3'-phosphate
  modified_base 7: mod_base = OTHER; note = 2'-deoxy-2'-fluoroadenosine-3'-phosphate
  modified_base 8: mod_base = OTHER; note = 2'-O-methylguanosine-3'-phosphate
  modified_base 9: mod_base = OTHER; note = 2'-deoxy-2'-fluorouridine-3'-phosphate
  modified_base 10: mod_base = OTHER; note = 2'-O-methyluridine-3'-phosphate
  modified_base 11: mod_base = OTHER; note = 2'-deoxy-2'-fluorouridine-3'-phosphate
  modified_base 12: mod_base = OTHER; note = 2'-O-methyladenosine-3'-phosphate
  modified_base 13: mod_base = OTHER; note = 2'-deoxy-2'-fluorouridine-3'-phosphate
  modified_base 14: mod_base = OTHER; note = 2'-O-methyluridine-3'-phosphate
  modified_base 15: mod_base = OTHER; note = 2'-deoxy-2'-fluorocytidine-3'-phosphate
  modified_base 16: mod_base = OTHER; note = 2'-O-methylguanosine-3'-phosphate
  modified_base 17: mod_base = OTHER; note = 2'-deoxy-2'-fluoroguanosine-3'-phosphate
  modified_base 18: mod_base = OTHER; note = 2'-O-methyladenosine-3'-phosphate
  modified_base 19: mod_base = OTHER; note = 2'-deoxy-2'-fluoroadenosine-3'-phosphate
  modified_base 20: mod_base = OTHER; note = 2'-deoxythymidine-3'-phosphorothioate
  misc_feature 1..19: note = RNA
  misc_feature 20..21: note = DNA
gcctggagtttattcggaatt

SEQ ID NO: 1384 - DNA, 21 bp, synthetic construct
  source 1..21: mol_type = other DNA
  modified_base 1: mod_base = OTHER; note = uridine-3'-phosphate
  modified_base 2: mod_base = OTHER; note = uridine-3'-phosphate
  modified_base 3: mod_base = OTHER; note = cytidine-3'-phosphate
  modified_base 4: mod_base = OTHER; note = cytidine-3'-phosphate
  modified_base 5: mod_base = OTHER; note = guanosine-3'-phosphate
  modified_base 6: mod_base = OTHER; note = adenosine-3'-phosphate
  modified_base 7: mod_base = OTHER; note = adenosine-3'-phosphate
  modified_base 8: mod_base = OTHER; note = 2'-O-methyluridine-3'-phosphate
  modified_base 9: mod_base = OTHER; note = adenosine-3'-phosphate
  modified_base 10: mod_base = OTHER; note = adenosine-3'-phosphate
  modified_base 11: mod_base = OTHER; note = adenosine-3'-phosphate
  modified_base 12: mod_base = OTHER; note = cytidine-3'-phosphate
  modified_base 13: mod_base = OTHER; note = uridine-3'-phosphate
  modified_base 14: mod_base = OTHER; note = cytidine-3'-phosphate
  modified_base 15: mod_base = OTHER; note = 2'-O-methylcytidine-3'-phosphate
  modified_base 16: mod_base = OTHER; note = adenosine-3'-phosphate
  modified_base 17: mod_base = OTHER; note = guanosine-3'-phosphate
  modified_base 18: mod_base = OTHER; note = guanosine-3'-phosphate
  modified_base 19: mod_base = OTHER; note = cytidine-3'-phosphate
  modified_base 20: mod_base = OTHER; note = 2'-deoxythymidine-3'-phosphorothioate
  misc_feature 1..19: note = RNA
  misc_feature 20..21: note = DNA
ttccgaataaactccaggctt

SEQ ID NO: 1385 - DNA, 21 bp, synthetic construct
  source 1..21: mol_type = other DNA
  modified_base 1: mod_base = OTHER; note = 2'-deoxy-2'-fluoroguanosine-3'-phosphate
  modified_base 2: mod_base = OTHER; note = 2'-O-methylcytidine-3'-phosphate
  modified_base 3: mod_base = OTHER; note = 2'-deoxy-2'-fluorocytidine-3'-phosphate
  modified_base 4: mod_base = OTHER; note = 2'-O-methyluridine-3'-phosphate
  modified_base 5: mod_base = OTHER; note = 2'-deoxy-2'-fluoroguanosine-3'-phosphate
  modified_base 6: mod_base = OTHER; note = 2'-O-methylguanosine-3'-phosphate
  modified_base 7: mod_base = OTHER; note = 2'-deoxy-2'-fluoroadenosine-3'-phosphate
  modified_base 8: mod_base = OTHER; note = 2'-O-methylguanosine-3'-phosphate
  modified_base 9: mod_base = OTHER; note = 2'-deoxy-2'-fluorouridine-3'-phosphate
  modified_base 10: mod_base = OTHER; note = 2'-O-methyluridine-3'-phosphate
  modified_base 11: mod_base = OTHER; note = 2'-deoxy-2'-fluorouridine-3'-phosphate
  modified_base 12: mod_base = OTHER; note = 2'-O-methyladenosine-3'-phosphate
  modified_base 13: mod_base = OTHER; note = 2'-deoxy-2'-fluorouridine-3'-phosphate
  modified_base 14: mod_base = OTHER; note = 2'-O-methyluridine-3'-phosphate
  modified_base 15: mod_base = OTHER; note = 2'-deoxy-2'-fluorocytidine-3'-phosphate
  modified_base 16: mod_base = OTHER; note = 2'-O-methylguanosine-3'-phosphate
  modified_base 17: mod_base = OTHER; note = 2'-deoxy-2'-fluoroguanosine-3'-phosphate
  modified_base 18: mod_base = OTHER; note = 2'-O-methyladenosine-3'-phosphate
  modified_base 19: mod_base = OTHER; note = 2'-deoxy-2'-fluoroadenosine-3'-phosphate
  modified_base 20: mod_base = OTHER; note = 2'-deoxythymidine-3'-phosphorothioate
  misc_feature 1..19: note = RNA
  misc_feature 20..21: note = DNA
gcctggagtttattcggaatt

SEQ ID NO: 1386 - DNA, 21 bp, synthetic construct
  source 1..21: mol_type = other DNA
  modified_base 1: mod_base = OTHER; note = 2'-O-methyluridine-3'-phosphate
  modified_base 2: mod_base = OTHER; note = uridine-3'-phosphate
  modified_base 3: mod_base = OTHER; note = 2'-O-methylcytidine-3'-phosphate
  modified_base 4: mod_base = OTHER; note = cytidine-3'-phosphate
  modified_base 5: mod_base = OTHER; note = guanosine-3'-phosphate
  modified_base 6: mod_base = OTHER; note = adenosine-3'-phosphate
  modified_base 7: mod_base = OTHER; note = adenosine-3'-phosphate
  modified_base 8: mod_base = OTHER; note = 2'-O-methyluridine-3'-phosphate
  modified_base 9: mod_base = OTHER; note = adenosine-3'-phosphate
  modified_base 10: mod_base = OTHER; note = adenosine-3'-phosphate
  modified_base 11: mod_base = OTHER; note = adenosine-3'-phosphate
  modified_base 12: mod_base = OTHER; note = cytidine-3'-phosphate
  modified_base 13: mod_base = OTHER; note = uridine-3'-phosphate
  modified_base 14: mod_base = OTHER; note = 2'-O-methylcytidine-3'-phosphate
  modified_base 15: mod_base = OTHER; note = 2'-O-methylcytidine-3'-phosphate
  modified_base 16: mod_base = OTHER; note = adenosine-3'-phosphate
  modified_base 17: mod_base = OTHER; note = guanosine-3'-phosphate
  modified_base 18: mod_base = OTHER; note = guanosine-3'-phosphate
  modified_base 19: mod_base = OTHER; note = cytidine-3'-phosphate
  modified_base 20: mod_base = OTHER; note = 2'-deoxythymidine-3'-phosphorothioate
  misc_feature 1..19: note = RNA
  misc_feature 20..21: note = DNA
ttccgaataaactccaggctt

SEQ ID NO: 1387 - DNA, 21 bp, synthetic construct
  source 1..21: mol_type = other DNA
  modified_base 1: mod_base = OTHER; note = 2'-deoxy-2'-fluoroguanosine-3'-phosphate
  modified_base 2: mod_base = OTHER; note = 2'-O-methylcytidine-3'-phosphate
  modified_base 3: mod_base = OTHER; note = 2'-deoxy-2'-fluorocytidine-3'-phosphate
  modified_base 4: mod_base = OTHER; note = 2'-O-methyluridine-3'-phosphate
  modified_base 5: mod_base = OTHER; note = 2'-deoxy-2'-fluoroguanosine-3'-phosphate
  modified_base 6: mod_base = OTHER; note = 2'-O-methylguanosine-3'-phosphate
  modified_base 7: mod_base = OTHER; note = 2'-deoxy-2'-fluoroadenosine-3'-phosphate
  modified_base 8: mod_base = OTHER; note = 2'-O-methylguanosine-3'-phosphate
  modified_base 9: mod_base = OTHER; note = 2'-deoxy-2'-fluorouridine-3'-phosphate
  modified_base 10: mod_base = OTHER; note = 2'-O-methyluridine-3'-phosphate
  modified_base 11: mod_base = OTHER; note = 2'-deoxy-2'-fluorouridine-3'-phosphate
  modified_base 12: mod_base = OTHER; note = 2'-O-methyladenosine-3'-phosphate
  modified_base 13: mod_base = OTHER; note = 2'-deoxy-2'-fluorouridine-3'-phosphate
  modified_base 14: mod_base = OTHER; note = 2'-O-methyluridine-3'-phosphate
  modified_base 15: mod_base = OTHER; note = 2'-deoxy-2'-fluorocytidine-3'-phosphate
  modified_base 16: mod_base = OTHER; note = 2'-O-methylguanosine-3'-phosphate
  modified_base 17: mod_base = OTHER; note = 2'-deoxy-2'-fluoroguanosine-3'-phosphate
  modified_base 18: mod_base = OTHER; note = 2'-O-methyladenosine-3'-phosphate
  modified_base 19: mod_base = OTHER; note = 2'-deoxy-2'-fluoroadenosine-3'-phosphate
  modified_base 20: mod_base = OTHER; note = 2'-deoxythymidine-3'-phosphorothioate
  misc_feature 1..19: note = RNA
  misc_feature 20..21: note = DNA
gcctggagtttattcggaatt

SEQ ID NO: 1388 - DNA, 21 bp, synthetic construct
  source 1..21: mol_type = other DNA
  modified_base 1: mod_base = OTHER; note = uridine-3'-phosphate
  modified_base 2: mod_base = OTHER; note = uridine-3'-phosphate
  modified_base 3: mod_base = OTHER; note = cytidine-3'-phosphate
  modified_base 4: mod_base = OTHER; note = cytidine-3'-phosphate
  modified_base 5: mod_base = OTHER; note = guanosine-3'-phosphate
  modified_base 6: mod_base = OTHER; note = adenosine-3'-phosphate
  modified_base 7: mod_base = OTHER; note = adenosine-3'-phosphate
  modified_base 8: mod_base = OTHER; note = uridine-3'-phosphate
  modified_base 9: mod_base = OTHER; note = adenosine-3'-phosphate
  modified_base 10: mod_base = OTHER; note = adenosine-3'-phosphate
  modified_base 11: mod_base = OTHER; note = adenosine-3'-phosphate
  modified_base 12: mod_base = OTHER; note = cytidine-3'-phosphate
  modified_base 13: mod_base = OTHER; note = uridine-3'-phosphate
  modified_base 14: mod_base = OTHER; note = cytidine-3'-phosphate
  modified_base 15: mod_base = OTHER; note = cytidine-3'-phosphate
  modified_base 16: mod_base = OTHER; note = adenosine-3'-phosphate
  modified_base 17: mod_base = OTHER; note = guanosine-3'-phosphate
  modified_base 18: mod_base = OTHER; note = guanosine-3'-phosphate
  modified_base 19: mod_base = OTHER; note = cytidine-3'-phosphate
  modified_base 20: mod_base = OTHER; note = 2'-deoxythymidine-3'-phosphorothioate
  misc_feature 1..19: note = RNA
  misc_feature 20..21: note = DNA
ttccgaataaactccaggctt

SEQ ID NO: 1389 - DNA, 21 bp, synthetic construct
  source 1..21: mol_type = other DNA
  modified_base 1: mod_base = OTHER; note = 2'-deoxy-2'-fluoroguanosine-3'-phosphate
  modified_base 2: mod_base = OTHER; note = 2'-O-methylcytidine-3'-phosphate
  modified_base 3: mod_base = OTHER; note = 2'-deoxy-2'-fluorocytidine-3'-phosphate
  modified_base 4: mod_base = OTHER; note = 2'-O-methyluridine-3'-phosphate
  modified_base 5: mod_base = OTHER; note = 2'-deoxy-2'-fluoroguanosine-3'-phosphate
  modified_base 6: mod_base = OTHER; note = 2'-O-methylguanosine-3'-phosphate
  modified_base 7: mod_base = OTHER; note = 2'-deoxy-2'-fluoroadenosine-3'-phosphate
  modified_base 8: mod_base = OTHER; note = 2'-O-methylguanosine-3'-phosphate
  modified_base 9: mod_base = OTHER; note = 2'-deoxy-2'-fluorouridine-3'-phosphate
  modified_base 10: mod_base = OTHER; note = 2'-O-methyluridine-3'-phosphate
  modified_base 11: mod_base = OTHER; note = 2'-deoxy-2'-fluorouridine-3'-phosphate
  modified_base 12: mod_base = OTHER; note = 2'-O-methyladenosine-3'-phosphate
  modified_base 13: mod_base = OTHER; note = 2'-deoxy-2'-fluorouridine-3'-phosphate
  modified_base 14: mod_base = OTHER; note = 2'-O-methyluridine-3'-phosphate
  modified_base 15: mod_base = OTHER; note = 2'-deoxy-2'-fluorocytidine-3'-phosphate
  modified_base 16: mod_base = OTHER; note = 2'-O-methylguanosine-3'-phosphate
  modified_base 17: mod_base = OTHER; note = 2'-deoxy-2'-fluoroguanosine-3'-phosphate
  modified_base 18: mod_base = OTHER; note = 2'-O-methyladenosine-3'-phosphate
  modified_base 19: mod_base = OTHER; note = 2'-deoxy-2'-fluoroadenosine-3'-phosphate
  modified_base 20: mod_base = OTHER; note = 2'-deoxythymidine-3'-phosphorothioate
  misc_feature 1..19: note = RNA
  misc_feature 20..21: note = DNA
gcctggagtttattcggaatt

SEQ ID NO: 1390 - RNA, 21 nt, synthetic construct
  source 1..21: mol_type = other RNA
  modified_base 19: mod_base = OTHER; note = cytidine-3'-phosphorothioate
  modified_base 20: mod_base = OTHER; note = 2'-O-methylcytidine-3'-phosphorothioate
  modified_base 21: mod_base = OTHER; note = 2'-O-methyluridine
ttccgaataaactccaggcct

SEQ ID NO: 1391 - DNA, 21 bp, synthetic construct
  source 1..21: mol_type = other DNA
  modified_base 1: mod_base = OTHER; note = 2'-deoxy-2'-fluoroguanosine-3'-phosphate
  modified_base 2: mod_base = OTHER; note = 2'-O-methylcytidine-3'-phosphate
  modified_base 3: mod_base = OTHER; note = 2'-deoxy-2'-fluorocytidine-3'-phosphate
  modified_base 4: mod_base = OTHER; note = 2'-O-methyluridine-3'-phosphate
  modified_base 5: mod_base = OTHER; note = 2'-deoxy-2'-fluoroguanosine-3'-phosphate
  modified_base 6: mod_base = OTHER; note = 2'-O-methylguanosine-3'-phosphate
  modified_base 7: mod_base = OTHER; note = 2'-deoxy-2'-fluoroadenosine-3'-phosphate
  modified_base 8: mod_base = OTHER; note = 2'-O-methylguanosine-3'-phosphate
  modified_base 9: mod_base = OTHER; note = 2'-deoxy-2'-fluorouridine-3'-phosphate
  modified_base 10: mod_base = OTHER; note = 2'-O-methyluridine-3'-phosphate
  modified_base 11: mod_base = OTHER; note = 2'-deoxy-2'-fluorouridine-3'-phosphate
  modified_base 12: mod_base = OTHER; note = 2'-O-methyladenosine-3'-phosphate
  modified_base 13: mod_base = OTHER; note = 2'-deoxy-2'-fluorouridine-3'-phosphate
  modified_base 14: mod_base = OTHER; note = 2'-O-methyluridine-3'-phosphate
  modified_base 15: mod_base = OTHER; note = 2'-deoxy-2'-fluorocytidine-3'-phosphate
  modified_base 16: mod_base = OTHER; note = 2'-O-methylguanosine-3'-phosphate
  modified_base 17: mod_base = OTHER; note = 2'-deoxy-2'-fluoroguanosine-3'-phosphate
  modified_base 18: mod_base = OTHER; note = 2'-O-methyladenosine-3'-phosphate
  modified_base 19: mod_base = OTHER; note = 2'-deoxy-2'-fluoroadenosine-3'-phosphate
  modified_base 20: mod_base = OTHER; note = 2'-deoxythymidine-3'-phosphorothioate
  misc_feature 1..19: note = RNA
  misc_feature 20..21: note = DNA
gcctggagtttattcggaatt

SEQ ID NO: 1392 - RNA, 21 nt, synthetic construct
  source 1..21: mol_type = other RNA
  modified_base 6: mod_base = OTHER; note = 2'-O-methyladenosine-3'-phosphate
  modified_base 7: mod_base = OTHER; note = 2'-O-methyladenosine-3'-phosphate
  modified_base 10: mod_base = OTHER; note = 2'-O-methyladenosine-3'-phosphate
  modified_base 11: mod_base = OTHER; note = 2'-O-methyladenosine-3'-phosphate
  modified_base 17: mod_base = OTHER; note = 2'-O-methylguanosine-3'-phosphate
  modified_base 18: mod_base = OTHER; note = 2'-O-methylguanosine-3'-phosphate
  modified_base 19: mod_base = OTHER; note = 2'-O-methylcytidine-3'-phosphorothioate
  modified_base 20: mod_base = OTHER; note = 2'-O-methylcytidine-3'-phosphorothioate
  modified_base 21: mod_base = OTHER; note = 2'-O-methyluridine
ttccgaataaactccaggcct

SEQ ID NO: 1393 - DNA, 21 bp, synthetic construct
  source 1..21: mol_type = other DNA
  modified_base 1: mod_base = OTHER; note = guanosine-3'-phosphate
  modified_base 2: mod_base = OTHER; note = cytidine-3'-phosphate
  modified_base 3: mod_base = OTHER; note = cytidine-3'-phosphate
  modified_base 4: mod_base = OTHER; note = uridine-3'-phosphate
  modified_base 5: mod_base = OTHER; note = guanosine-3'-phosphate
  modified_base 6: mod_base = OTHER; note = guanosine-3'-phosphate
  modified_base 7: mod_base = OTHER; note = adenosine-3'-phosphate
  modified_base 8: mod_base = OTHER; note = guanosine-3'-phosphate
  modified_base 9: mod_base = OTHER; note = uridine-3'-phosphate
  modified_base 10: mod_base = OTHER; note = uridine-3'-phosphate
  modified_base 11: mod_base = OTHER; note = uridine-3'-phosphate
  modified_base 12: mod_base = OTHER; note = adenosine-3'-phosphate
  modified_base 13: mod_base = OTHER; note = uridine-3'-phosphate
  modified_base 14: mod_base = OTHER; note = uridine-3'-phosphate
  modified_base 15: mod_base = OTHER; note = cytidine-3'-phosphate
  modified_base 16: mod_base = OTHER; note = guanosine-3'-phosphate
  modified_base 17: mod_base = OTHER; note = guanosine-3'-phosphate
  modified_base 18: mod_base = OTHER; note = adenosine-3'-phosphate
  modified_base 19: mod_base = OTHER; note = adenosine-3'-phosphate
  modified_base 20: mod_base = OTHER; note = 2'-deoxythymidine-3'-phosphorothioate
  misc_feature 1..19: note = RNA
  misc_feature 20..21: note = DNA
gcctggagtttattcggaatt

SEQ ID NO: 1394 - DNA, 21 bp, synthetic construct
  source 1..21: mol_type = other DNA
  modified_base 1: mod_base = OTHER; note = 2'-O-methyluridine-3'-phosphate 5'phosphate
  modified_base 2: mod_base = OTHER; note = 2'-deoxy-2'-fluorouridine-3'-phosphate
  modified_base 3: mod_base = OTHER; note = 2'-O-methylcytidine-3'-phosphate
  modified_base 4: mod_base = OTHER; note = 2'-deoxy-2'-fluorocytidine-3'-phosphate
  modified_base 5: mod_base = OTHER; note = 2'-O-methylguanosine-3'-phosphate
  modified_base 6: mod_base = OTHER; note = 2'-deoxy-2'-fluoroadenosine-3'-phosphate
  modified_base 7: mod_base = OTHER; note = 2'-O-methyladenosine-3'-phosphate
  modified_base 8: mod_base = OTHER; note = 2'-deoxy-2'-fluorouridine-3'-phosphate
  modified_base 9: mod_base = OTHER; note = 2'-O-methyladenosine-3'-phosphate
  modified_base 10: mod_base = OTHER; note = 2'-deoxy-2'-fluoroadenosine-3'-phosphate
  modified_base 11: mod_base = OTHER; note = 2'-O-methyladenosine-3'-phosphate
  modified_base 12: mod_base = OTHER; note = 2'-deoxy-2'-fluorocytidine-3'-phosphate
  modified_base 13: mod_base = OTHER; note = 2'-O-methyluridine-3'-phosphate
  modified_base 14: mod_base = OTHER; note = 2'-deoxy-2'-fluorocytidine-3'-phosphate
  modified_base 15: mod_base = OTHER; note = 2'-O-methylcytidine-3'-phosphate
  modified_base 16: mod_base = OTHER; note = 2'-deoxy-2'-fluoroadenosine-3'-phosphate
  modified_base 17: mod_base = OTHER; note = 2'-O-methylguanosine-3'-phosphate
  modified_base 18: mod_base = OTHER; note = 2'-deoxy-2'-fluoroguanosine-3'-phosphate
  modified_base 19: mod_base = OTHER; note = 2'-O-methylcytidine-3'-phosphate
  modified_base 20: mod_base = OTHER; note = 2'-deoxythymidine-3'-phosphorothioate
  misc_feature 1..19: note = RNA
  misc_feature 20..21: note = DNA
ttccgaataaactccaggctt

SEQ ID NO: 1395 - DNA, 21 bp, synthetic construct
  source 1..21: mol_type = other DNA
  modified_base 1: mod_base = OTHER; note = guanosine-3'-phosphate
  modified_base 2: mod_base = OTHER; note = 2'-O-methylcytidine-3'-phosphate
  modified_base 3: mod_base = OTHER; note = 2'-O-methylcytidine-3'-phosphate
  modified_base 4: mod_base = OTHER; note = 2'-O-methyluridine-3'-phosphate
  modified_base 5: mod_base = OTHER; note = guanosine-3'-phosphate
  modified_base 6: mod_base = OTHER; note = guanosine-3'-phosphate
  modified_base 7: mod_base = OTHER; note = adenosine-3'-phosphate
  modified_base 8: mod_base = OTHER; note = guanosine-3'-phosphate
  modified_base 9: mod_base = OTHER; note = 2'-O-methyluridine-3'-phosphate
  modified_base 10: mod_base = OTHER; note = 2'-O-methyluridine-3'-phosphate
  modified_base 11: mod_base = OTHER; note = 2'-O-methyluridine-3'-phosphate
  modified_base 12: mod_base = OTHER; note = adenosine-3'-phosphate
  modified_base 13: mod_base = OTHER; note = 2'-O-methyluridine-3'-phosphate
  modified_base 14: mod_base = OTHER; note = 2'-O-methyluridine-3'-phosphate
  modified_base 15: mod_base = OTHER; note = 2'-O-methylcytidine-3'-phosphate
  modified_base 16: mod_base = OTHER; note = guanosine-3'-phosphate
  modified_base 17: mod_base = OTHER; note = guanosine-3'-phosphate
  modified_base 18: mod_base = OTHER; note = adenosine-3'-phosphate
  modified_base 19: mod_base = OTHER; note = adenosine-3'-phosphate
  modified_base 20: mod_base = OTHER; note = 2'-deoxythymidine-3'-phosphorothioate
  misc_feature 1..19: note = RNA
  misc_feature 20..21: note = DNA
gcctggagtttattcggaatt

SEQ ID NO: 1396 - DNA, 21 bp, synthetic construct
  source 1..21: mol_type = other DNA
  modified_base 1: mod_base = OTHER; note = 2'-O-methyluridine-3'-phosphate 5'phosphate
  modified_base 2: mod_base = OTHER; note = 2'-deoxy-2'-fluorouridine-3'-phosphate
  modified_base 3: mod_base = OTHER; note = 2'-O-methylcytidine-3'-phosphate
  modified_base 4: mod_base = OTHER; note = 2'-deoxy-2'-fluorocytidine-3'-phosphate
  modified_base 5: mod_base = OTHER; note = 2'-O-methylguanosine-3'-phosphate
  modified_base 6: mod_base = OTHER; note = 2'-deoxy-2'-fluoroadenosine-3'-phosphate
  modified_base 7: mod_base = OTHER; note = 2'-O-methyladenosine-3'-phosphate
  modified_base 8: mod_base = OTHER; note = 2'-deoxy-2'-fluorouridine-3'-phosphate
  modified_base 9: mod_base = OTHER; note = 2'-O-methyladenosine-3'-phosphate
  modified_base 10: mod_base = OTHER; note = 2'-deoxy-2'-fluoroadenosine-3'-phosphate
  modified_base 11: mod_base = OTHER; note = 2'-O-methyladenosine-3'-phosphate
  modified_base 12: mod_base = OTHER; note = 2'-deoxy-2'-fluorocytidine-3'-phosphate
  modified_base 13: mod_base = OTHER; note = 2'-O-methyluridine-3'-phosphate
  modified_base 14: mod_base = OTHER; note = 2'-deoxy-2'-fluorocytidine-3'-phosphate
  modified_base 15: mod_base = OTHER; note = 2'-O-methylcytidine-3'-phosphate
  modified_base 16: mod_base = OTHER; note = 2'-deoxy-2'-fluoroadenosine-3'-phosphate
  modified_base 17: mod_base = OTHER; note = 2'-O-methylguanosine-3'-phosphate
  modified_base 18: mod_base = OTHER; note = 2'-deoxy-2'-fluoroguanosine-3'-phosphate
  modified_base 19: mod_base = OTHER; note = 2'-O-methylcytidine-3'-phosphate
  modified_base 20: mod_base = OTHER; note = 2'-deoxythymidine-3'-phosphorothioate
  misc_feature 1..19: note = RNA
  misc_feature 20..21: note = DNA
ttccgaataaactccaggctt

SEQ ID NO: 1397 - DNA, 21 bp, synthetic construct
  source 1..21: mol_type = other DNA
  modified_base 1: mod_base = OTHER; note = guanosine-3'-phosphate
  modified_base 2: mod_base = OTHER; note = 2'-O-methylcytidine-3'-phosphate
  modified_base 3: mod_base = OTHER; note = cytidine-3'-phosphate
  modified_base 4: mod_base = OTHER; note = 2'-O-methyluridine-3'-phosphate
  modified_base 5: mod_base = OTHER; note = guanosine-3'-phosphate
  modified_base 6: mod_base = OTHER; note = 2'-O-methylguanosine-3'-phosphate
  modified_base 7: mod_base = OTHER; note = adenosine-3'-phosphate
  modified_base 8: mod_base = OTHER; note = 2'-O-methylguanosine-3'-phosphate
  modified_base 9: mod_base = OTHER; note = uridine-3'-phosphate
  modified_base 10: mod_base = OTHER; note = 2'-O-methyluridine-3'-phosphate
  modified_base 11: mod_base = OTHER; note = uridine-3'-phosphate
  modified_base 12: mod_base = OTHER; note = 2'-O-methyladenosine-3'-phosphate
  modified_base 13: mod_base = OTHER; note = uridine-3'-phosphate
  modified_base 14: mod_base = OTHER; note = 2'-O-methyluridine-3'-phosphate
  modified_base 15: mod_base = OTHER; note = cytidine-3'-phosphate
  modified_base 16: mod_base = OTHER; note = 2'-O-methylguanosine-3'-phosphate
  modified_base 17: mod_base = OTHER; note = guanosine-3'-phosphate
  modified_base 18: mod_base = OTHER; note = 2'-O-methyladenosine-3'-phosphate
  modified_base 19: mod_base = OTHER; note = adenosine-3'-phosphate
  modified_base 20: mod_base = OTHER; note = 2'-deoxythymidine-3'-phosphorothioate
  misc_feature 1..19: note = RNA
  misc_feature 20..21: note = DNA
gcctggagtttattcggaatt

SEQ ID NO: 1398 - DNA, 21 bp, synthetic construct
  source 1..21: mol_type = other DNA
  modified_base 1: mod_base = OTHER; note = 2'-O-methyluridine-3'-phosphate 5'phosphate
  modified_base 2: mod_base = OTHER; note = 2'-deoxy-2'-fluorouridine-3'-phosphate
  modified_base 3: mod_base = OTHER; note = 2'-O-methylcytidine-3'-phosphate
  modified_base 4: mod_base = OTHER; note = 2'-deoxy-2'-fluorocytidine-3'-phosphate
  modified_base 5: mod_base = OTHER; note = 2'-O-methylguanosine-3'-phosphate
  modified_base 6: mod_base = OTHER; note = 2'-deoxy-2'-fluoroadenosine-3'-phosphate
  modified_base 7: mod_base = OTHER; note = 2'-O-methyladenosine-3'-phosphate
  modified_base 8: mod_base = OTHER; note = 2'-deoxy-2'-fluorouridine-3'-phosphate
  modified_base 9: mod_base = OTHER; note = 2'-O-methyladenosine-3'-phosphate
  modified_base 10: mod_base = OTHER; note = 2'-deoxy-2'-fluoroadenosine-3'-phosphate
  modified_base 11: mod_base = OTHER; note = 2'-O-methyladenosine-3'-phosphate
  modified_base 12: mod_base = OTHER; note = 2'-deoxy-2'-fluorocytidine-3'-phosphate
  modified_base 13: mod_base = OTHER; note = 2'-O-methyluridine-3'-phosphate
  modified_base 14: mod_base = OTHER; note = 2'-deoxy-2'-fluorocytidine-3'-phosphate
  modified_base 15: mod_base = OTHER; note = 2'-O-methylcytidine-3'-phosphate
  modified_base 16: mod_base = OTHER; note = 2'-deoxy-2'-fluoroadenosine-3'-phosphate
  modified_base 17: mod_base = OTHER; note = 2'-O-methylguanosine-3'-phosphate
  modified_base 18: mod_base = OTHER; note = 2'-deoxy-2'-fluoroguanosine-3'-phosphate
  modified_base 19: mod_base = OTHER; note = 2'-O-methylcytidine-3'-phosphate
  modified_base 20: mod_base = OTHER; note = 2'-deoxythymidine-3'-phosphorothioate
  misc_feature 1..19: note = RNA
  misc_feature 20..21: note = DNA
ttccgaataaactccaggctt

SEQ ID NO: 1399 - DNA, 22 bp, synthetic construct
  source 1..22: mol_type = other DNA
  modified_base 1: mod_base = OTHER; note = 2'-deoxy-2'-fluoroguanosine-3'-phosphate
  modified_base 2: mod_base = OTHER; note = 2'-O-methylcytidine-3'-phosphate
  modified_base 3: mod_base = OTHER; note = 2'-deoxy-2'-fluorocytidine-3'-phosphate
  modified_base 4: mod_base = OTHER; note = 2'-O-methyluridine-3'-phosphate
  modified_base 5: mod_base = OTHER; note = 2'-deoxy-2'-fluoroguanosine-3'-phosphate
  modified_base 6: mod_base = OTHER; note = 2'-O-methylguanosine-3'-phosphate
  modified_base 7: mod_base = OTHER; note = 2'-deoxy-2'-fluoroadenosine-3'-phosphate
  modified_base 8: mod_base = OTHER; note = 2'-O-methylguanosine-3'-phosphate
  modified_base 9: mod_base = OTHER; note = 2'-deoxy-2'-fluorouridine-3'-phosphate
  modified_base 10: mod_base = OTHER; note = 2'-O-methyluridine-3'-phosphate
  modified_base 11: mod_base = OTHER; note = 2'-deoxy-2'-fluorouridine-3'-phosphate
  modified_base 12: mod_base = OTHER; note = 2'-O-methyladenosine-3'-phosphate
  modified_base 13: mod_base = OTHER; note = 2'-deoxy-2'-fluorouridine-3'-phosphate
  modified_base 14: mod_base = OTHER; note = 2'-O-methyluridine-3'-phosphate
  modified_base 15: mod_base = OTHER; note = 2'-deoxy-2'-fluorocytidine-3'-phosphate
  modified_base 16: mod_base = OTHER; note = 2'-O-methylguanosine-3'-phosphate
  modified_base 17: mod_base = OTHER; note = 2'-deoxy-2'-fluoroguanosine-3'-phosphate
  modified_base 18: mod_base = OTHER; note = 2'-O-methyladenosine-3'-phosphate
  modified_base 19: mod_base = OTHER; note = 2'-deoxy-2'-fluoroadenosine-3'-phosphate
  modified_base 22: mod_base = OTHER; note = abasic nucleotide
  misc_feature 1..19: note = RNA
  misc_feature 22: note = RNA
  misc_feature 20..21: note = DNA
gcctggagtttattcggaattn

SEQ ID NO: 1400 - DNA, 22 bp, synthetic construct
  source 1..22: mol_type = other DNA
  modified_base 1: mod_base = OTHER; note = 2'-O-methyluridine-3'-phosphate 5'phosphate
  modified_base 2: mod_base = OTHER; note = 2'-deoxy-2'-fluorouridine-3'-phosphate
  modified_base 3: mod_base = OTHER; note = 2'-O-methylcytidine-3'-phosphate
  modified_base 4: mod_base = OTHER; note = 2'-deoxy-2'-fluorocytidine-3'-phosphate
  modified_base 5: mod_base = OTHER; note = 2'-O-methylguanosine-3'-phosphate
  modified_base 6: mod_base = OTHER; note = 2'-deoxy-2'-fluoroadenosine-3'-phosphate
  modified_base 7: mod_base = OTHER; note = 2'-O-methyladenosine-3'-phosphate
  modified_base 8: mod_base = OTHER; note = 2'-deoxy-2'-fluorouridine-3'-phosphate
  modified_base 9: mod_base = OTHER; note = 2'-O-methyladenosine-3'-phosphate
  modified_base 10: mod_base = OTHER; note = 2'-deoxy-2'-fluoroadenosine-3'-phosphate
  modified_base 11: mod_base = OTHER; note = 2'-O-methyladenosine-3'-phosphate
  modified_base 12: mod_base = OTHER; note = 2'-deoxy-2'-fluorocytidine-3'-phosphate
  modified_base 13: mod_base = OTHER; note = 2'-O-methyluridine-3'-phosphate
  modified_base 14: mod_base = OTHER; note = 2'-deoxy-2'-fluorocytidine-3'-phosphate
  modified_base 15: mod_base = OTHER; note = 2'-O-methylcytidine-3'-phosphate
  modified_base 16: mod_base = OTHER; note = 2'-deoxy-2'-fluoroadenosine-3'-phosphate
  modified_base 17: mod_base = OTHER; note = 2'-O-methylguanosine-3'-phosphate
  modified_base 18: mod_base = OTHER; note = 2'-deoxy-2'-fluoroguanosine-3'-phosphate
  modified_base 19: mod_base = OTHER; note = 2'-O-methylcytidine-3'-phosphate
  modified_base 22: mod_base = OTHER; note = abasic nucleotide
  misc_feature 1..19: note = RNA
  misc_feature 22: note = RNA
  misc_feature 20..21: note = DNA
ttccgaataaactccaggcttn

SEQ ID NO: 1401 - RNA, 19 nt, synthetic construct
  source 1..19: mol_type = other RNA
  modified_base 1: mod_base = OTHER; note = 2'-deoxy-2'-fluoroguanosine-3'-phosphate
  modified_base 2: mod_base = OTHER; note = 2'-O-methylcytidine-3'-phosphate
  modified_base 3: mod_base = OTHER; note = 2'-deoxy-2'-fluorocytidine-3'-phosphate
  modified_base 4: mod_base = OTHER; note = 2'-O-methyluridine-3'-phosphate
  modified_base 5: mod_base = OTHER; note = 2'-deoxy-2'-fluoroguanosine-3'-phosphate
  modified_base 6: mod_base = OTHER; note = 2'-O-methylguanosine-3'-phosphate
  modified_base 7: mod_base = OTHER; note = 2'-deoxy-2'-fluoroadenosine-3'-phosphate
  modified_base 8: mod_base = OTHER; note = 2'-O-methylguanosine-3'-phosphate
  modified_base 9: mod_base = OTHER; note = 2'-deoxy-2'-fluorouridine-3'-phosphate
  modified_base 10: mod_base = OTHER; note = 2'-O-methyluridine-3'-phosphate
  modified_base 11: mod_base = OTHER; note = 2'-deoxy-2'-fluorouridine-3'-phosphate
  modified_base 12: mod_base = OTHER; note = 2'-O-methyladenosine-3'-phosphate
  modified_base 13: mod_base = OTHER; note = 2'-deoxy-2'-fluorouridine-3'-phosphate
  modified_base 14: mod_base = OTHER; note = 2'-O-methyluridine-3'-phosphate
  modified_base 15: mod_base = OTHER; note = 2'-deoxy-2'-fluorocytidine-3'-phosphate
  modified_base 16: mod_base = OTHER; note = 2'-O-methylguanosine-3'-phosphate
  modified_base 17: mod_base = OTHER; note = 2'-deoxy-2'-fluoroguanosine-3'-phosphate
  modified_base 18: mod_base = OTHER; note = 2'-O-methyladenosine-3'-phosphate
  modified_base 19: mod_base = OTHER; note = 2'-deoxy-2'-fluoroadenosine
gcctggagtttattcggaa

SEQ ID NO: 1402 - RNA, 21 nt, synthetic construct
  source 1..21: mol_type = other RNA
  modified_base 1: mod_base = OTHER; note = 2'-O-methyluridine-3'-phosphate 5'phosphate
  modified_base 2: mod_base = OTHER; note = 2'-deoxy-2'-fluorouridine-3'-phosphate
  modified_base 3: mod_base = OTHER; note = 2'-O-methylcytidine-3'-phosphate
  modified_base 4: mod_base = OTHER; note = 2'-deoxy-2'-fluorocytidine-3'-phosphate
  modified_base 5: mod_base = OTHER; note = 2'-O-methylguanosine-3'-phosphate
  modified_base 6: mod_base = OTHER; note = 2'-deoxy-2'-fluoroadenosine-3'-phosphate
  modified_base 7: mod_base = OTHER; note = 2'-O-methyladenosine-3'-phosphate
  modified_base 8: mod_base = OTHER; note = 2'-deoxy-2'-fluorouridine-3'-phosphate
  modified_base 9: mod_base = OTHER; note = 2'-O-methyladenosine-3'-phosphate
  modified_base 10: mod_base = OTHER; note = 2'-deoxy-2'-fluoroadenosine-3'-phosphate
  modified_base 11: mod_base = OTHER; note = 2'-O-methyladenosine-3'-phosphate
  modified_base 12: mod_base = OTHER; note = 2'-deoxy-2'-fluorocytidine-3'-phosphate
  modified_base 13: mod_base = OTHER; note = 2'-O-methyluridine-3'-phosphate
  modified_base 14: mod_base = OTHER; note = 2'-deoxy-2'-fluorocytidine-3'-phosphate
  modified_base 15: mod_base = OTHER; note = 2'-O-methylcytidine-3'-phosphate
  modified_base 16: mod_base = OTHER; note = 2'-deoxy-2'-fluoroadenosine-3'-phosphate
  modified_base 17: mod_base = OTHER; note = 2'-O-methylguanosine-3'-phosphate
  modified_base 18: mod_base = OTHER; note = 2'-deoxy-2'-fluoroguanosine-3'-phosphate
  modified_base 19: mod_base = OTHER; note = 2'-O-methylcytidine-3'-phosphorothioate
  modified_base 20: mod_base = OTHER; note = 2'-deoxy-2'-fluorocytidine-3'-phosphorothioate
  modified_base 21: mod_base = OTHER; note = 2'-O-methyluridine
ttccgaataaactccaggcct

SEQ ID NO: 1403 - RNA, 19 nt, synthetic construct
  source 1..19: mol_type = other RNA
  modified_base 1: mod_base = OTHER; note = 2'-deoxy-2'-fluoroguanosine-3'-phosphate
  modified_base 2: mod_base = OTHER; note = 2'-O-methylcytidine-3'-phosphate
  modified_base 3: mod_base = OTHER; note = 2'-deoxy-2'-fluorocytidine-3'-phosphate
  modified_base 4: mod_base = OTHER; note = 2'-O-methyluridine-3'-phosphate
  modified_base 5: mod_base = OTHER; note = 2'-deoxy-2'-fluoroguanosine-3'-phosphate
  modified_base 6: mod_base = OTHER; note = 2'-O-methylguanosine-3'-phosphate
  modified_base 7: mod_base = OTHER; note = 2'-deoxy-2'-fluoroadenosine-3'-phosphate
  modified_base 8: mod_base = OTHER; note = 2'-O-methylguanosine-3'-phosphate
  modified_base 9: mod_base = OTHER; note = 2'-deoxy-2'-fluorouridine-3'-phosphate
  modified_base 10: mod_base = OTHER; note = 2'-O-methyluridine-3'-phosphate
  modified_base 11: mod_base = OTHER; note = 2'-deoxy-2'-fluorouridine-3'-phosphate
  modified_base 12: mod_base = OTHER; note = 2'-O-methyladenosine-3'-phosphate
  modified_base 13: mod_base = OTHER; note = 2'-deoxy-2'-fluorouridine-3'-phosphate
  modified_base 14: mod_base = OTHER; note = 2'-O-methyluridine-3'-phosphate
  modified_base 15: mod_base = OTHER; note = 2'-deoxy-2'-fluorocytidine-3'-phosphate
  modified_base 16: mod_base = OTHER; note = 2'-O-methylguanosine-3'-phosphate
  modified_base 17: mod_base = OTHER; note = 2'-deoxy-2'-fluoroguanosine-3'-phosphate
  modified_base 18: mod_base = OTHER; note = 2'-O-methyladenosine-3'-phosphate
  modified_base 19: mod_base = OTHER; note = 2'-deoxy-2'-fluoroadenosine
gcctggagtttattcggaa

SEQ ID NO: 1404 - RNA, 21 nt, synthetic construct
  source 1..21: mol_type = other RNA
  modified_base 6: mod_base = OTHER; note = 2'-O-methyladenosine-3'-phosphate
  modified_base 7: mod_base = OTHER; note = 2'-O-methyladenosine-3'-phosphate
  modified_base 10: mod_base = OTHER; note = 2'-O-methyladenosine-3'-phosphate
  modified_base 11: mod_base = OTHER; note = 2'-O-methyladenosine-3'-phosphate
  modified_base 17: mod_base = OTHER; note = 2'-O-methylguanosine-3'-phosphate
  modified_base 18: mod_base = OTHER; note = 2'-O-methylguanosine-3'-phosphate
  modified_base 19: mod_base = OTHER; note = 2'-O-methylcytidine-3'-phosphorothioate
  modified_base 20: mod_base = OTHER; note = 2'-O-methylcytidine-3'-phosphorothioate
  modified_base 21: mod_base = OTHER; note = 2'-O-methyluridine
ttccgaataaactccaggcct

SEQ ID NO: 1405 - RNA, 19 nt, synthetic construct
  source 1..19: mol_type = other RNA
  modified_base 1: mod_base = OTHER; note = 2'-deoxy-2'-fluoroguanosine-3'-phosphate
  modified_base 2: mod_base = OTHER; note = 2'-O-methylcytidine-3'-phosphate
  modified_base 3: mod_base = OTHER; note = 2'-deoxy-2'-fluorocytidine-3'-phosphate
  modified_base 4: mod_base = OTHER; note = 2'-O-methyluridine-3'-phosphate
  modified_base 5: mod_base = OTHER; note = 2'-deoxy-2'-fluoroguanosine-3'-phosphate
  modified_base 6: mod_base = OTHER; note = 2'-O-methylguanosine-3'-phosphate
  modified_base 7: mod_base = OTHER; note = 2'-deoxy-2'-fluoroadenosine-3'-phosphate
  modified_base 8: mod_base = OTHER; note = 2'-O-methylguanosine-3'-phosphate
  modified_base 9: mod_base = OTHER; note = 2'-deoxy-2'-fluorouridine-3'-phosphate
  modified_base 10: mod_base = OTHER; note = 2'-O-methyluridine-3'-phosphate
  modified_base 11: mod_base = OTHER; note = 2'-deoxy-2'-fluorouridine-3'-phosphate
  modified_base 12: mod_base = OTHER; note = 2'-O-methyladenosine-3'-phosphate
  modified_base 13: mod_base = OTHER; note = 2'-deoxy-2'-fluorouridine-3'-phosphate
  modified_base 14: mod_base = OTHER; note = 2'-O-methyluridine-3'-phosphate
  modified_base 15: mod_base = OTHER; note = 2'-deoxy-2'-fluorocytidine-3'-phosphate
  modified_base 16: mod_base = OTHER; note = 2'-O-methylguanosine-3'-phosphate
  modified_base 17: mod_base = OTHER; note = 2'-deoxy-2'-fluoroguanosine-3'-phosphate
  modified_base 18: mod_base = OTHER; note = 2'-O-methyladenosine-3'-phosphate
  modified_base 19: mod_base = OTHER; note = 2'-deoxy-2'-fluoroadenosine
gcctggagtttattcggaa

SEQ ID NO: 1406 - RNA, 21 nt, synthetic construct
  source 1..21: mol_type = other RNA
  modified_base 19: mod_base = OTHER; note = cytidine-3'-phosphorothioate
  modified_base 20: mod_base = OTHER; note = 2'-O-methylcytidine-3'-phosphorothioate
  modified_base 21: mod_base = OTHER; note = 2'-O-methyluridine
ttccgaataaactccaggcct

SEQ ID NO: 1407 - RNA, 19 nt, synthetic construct
  source 1..19: mol_type = other RNA
  modified_base 1: mod_base = OTHER; note = 2'-deoxy-2'-fluoroguanosine-3'-phosphate
  modified_base 2: mod_base = OTHER; note = 2'-O-methylcytidine-3'-phosphate
  modified_base 3: mod_base = OTHER; note = 2'-deoxy-2'-fluorocytidine-3'-phosphate
  modified_base 4: mod_base = OTHER; note = 2'-O-methyluridine-3'-phosphate
  modified_base 5: mod_base = OTHER; note = 2'-deoxy-2'-fluoroguanosine-3'-phosphate
  modified_base 6: mod_base = OTHER; note = 2'-O-methylguanosine-3'-phosphate
  modified_base 7: mod_base = OTHER; note = 2'-deoxy-2'-fluoroadenosine-3'-phosphate
  modified_base 8: mod_base = OTHER; note = 2'-O-methylguanosine-3'-phosphate
  modified_base 9: mod_base = OTHER; note = 2'-deoxy-2'-fluorouridine-3'-phosphate
  modified_base 10: mod_base = OTHER; note = 2'-O-methyluridine-3'-phosphate
  modified_base 11: mod_base = OTHER; note = 2'-deoxy-2'-fluorouridine-3'-phosphate
  modified_base 12: mod_base = OTHER; note = 2'-O-methyladenosine-3'-phosphate
  modified_base 13: mod_base = OTHER; note = 2'-deoxy-2'-fluorouridine-3'-phosphate
  modified_base 14: mod_base = OTHER; note = 2'-O-methyluridine-3'-phosphate
  modified_base 15: mod_base = OTHER; note = 2'-deoxy-2'-fluorocytidine-3'-phosphate
  modified_base 16: mod_base = OTHER; note = 2'-O-methylguanosine-3'-phosphate
  modified_base 17: mod_base = OTHER; note = 2'-deoxy-2'-fluoroguanosine-3'-phosphate
  modified_base 18: mod_base = OTHER; note = 2'-O-methyladenosine-3'-phosphate
  modified_base 19: mod_base = OTHER; note = 2'-deoxy-2'-fluoroadenosine
gcctggagtttattcggaa

SEQ ID NO: 1408 - DNA, 21 bp, synthetic construct
  source 1..21: mol_type = other DNA
  modified_base 1: mod_base = OTHER; note = uridine-3'-phosphate
  modified_base 2: mod_base = OTHER; note = uridine-3'-phosphate
  modified_base 3: mod_base = OTHER; note = cytidine-3'-phosphate
  modified_base 4: mod_base = OTHER; note = cytidine-3'-phosphate
  modified_base 5: mod_base = OTHER; note = guanosine-3'-phosphate
  modified_base 6: mod_base = OTHER; note = adenosine-3'-phosphate
  modified_base 7: mod_base = OTHER; note = adenosine-3'-phosphate
  modified_base 8: mod_base = OTHER; note = 2'-O-methyluridine-3'-phosphate
  modified_base 9: mod_base = OTHER; note = adenosine-3'-phosphate
  modified_base 10: mod_base = OTHER; note = adenosine-3'-phosphate
  modified_base 11: mod_base = OTHER; note = adenosine-3'-phosphate
  modified_base 12: mod_base = OTHER; note = cytidine-3'-phosphate
  modified_base 13: mod_base = OTHER; note = uridine-3'-phosphate
  modified_base 14: mod_base = OTHER; note = cytidine-3'-phosphate
  modified_base 15: mod_base = OTHER; note = 2'-O-methylcytidine-3'-phosphate
  modified_base 16: mod_base = OTHER; note = adenosine-3'-phosphate
  modified_base 17: mod_base = OTHER; note = guanosine-3'-phosphate
  modified_base 18: mod_base = OTHER; note = guanosine-3'-phosphate
  modified_base 19: mod_base = OTHER; note = cytidine-3'-phosphate
  modified_base 20: mod_base = OTHER; note = 2'-deoxythymidine-3'-phosphorothioate
  misc_feature 1..19: note = RNA
  misc_feature 20..21: note = DNA
ttccgaataaactccaggctt

SEQ ID NO: 1409 - RNA, 19 nt, synthetic construct
  source 1..19: mol_type = other RNA
  modified_base 1: mod_base = OTHER; note = 2'-deoxy-2'-fluoroguanosine-3'-phosphate
  modified_base 2: mod_base = OTHER; note = 2'-O-methylcytidine-3'-phosphate
  modified_base 3: mod_base = OTHER; note = 2'-deoxy-2'-fluorocytidine-3'-phosphate
  modified_base 4: mod_base = OTHER; note = 2'-O-methyluridine-3'-phosphate
  modified_base 5: mod_base = OTHER; note = 2'-deoxy-2'-fluoroguanosine-3'-phosphate
  modified_base 6: mod_base = OTHER; note = 2'-O-methylguanosine-3'-phosphate
  modified_base 7: mod_base = OTHER; note = 2'-deoxy-2'-fluoroadenosine-3'-phosphate
  modified_base 8: mod_base = OTHER; note = 2'-O-methylguanosine-3'-phosphate
  modified_base 9: mod_base = OTHER; note = 2'-deoxy-2'-fluorouridine-3'-phosphate
  modified_base 10: mod_base = OTHER; note = 2'-O-methyluridine-3'-phosphate
  modified_base 11: mod_base = OTHER; note = 2'-deoxy-2'-fluorouridine-3'-phosphate
  modified_base 12: mod_base = OTHER; note = 2'-O-methyladenosine-3'-phosphate
  modified_base 13: mod_base = OTHER; note = 2'-deoxy-2'-fluorouridine-3'-phosphate
  modified_base 14: mod_base = OTHER; note = 2'-O-methyluridine-3'-phosphate
  modified_base 15: mod_base = OTHER; note = 2'-deoxy-2'-fluorocytidine-3'-phosphate
  modified_base 16: mod_base = OTHER; note = 2'-O-methylguanosine-3'-phosphate
  modified_base 17: mod_base = OTHER; note = 2'-deoxy-2'-fluoroguanosine-3'-phosphate
  modified_base 18: mod_base = OTHER; note = 2'-O-methyladenosine-3'-phosphate
  modified_base 19: mod_base = OTHER; note = 2'-deoxy-2'-fluoroadenosine
gcctggagtttattcggaa

SEQ ID NO: 1410 - DNA, 21 bp, synthetic construct
  source 1..21: mol_type = other DNA
  modified_base 1: mod_base = OTHER; note = 2'-O-methyluridine-3'-phosphate
  modified_base 2: mod_base = OTHER; note = uridine-3'-phosphate
  modified_base 3: mod_base = OTHER; note = 2'-O-methylcytidine-3'-phosphate
  modified_base 4: mod_base = OTHER; note = cytidine-3'-phosphate
  modified_base 5: mod_base = OTHER; note = guanosine-3'-phosphate
  modified_base 6: mod_base = OTHER; note = adenosine-3'-phosphate
  modified_base 7: mod_base = OTHER; note = adenosine-3'-phosphate
  modified_base 8: mod_base = OTHER; note = 2'-O-methyluridine-3'-phosphate
  modified_base 9: mod_base = OTHER; note = adenosine-3'-phosphate
  modified_base 10: mod_base = OTHER; note = adenosine-3'-phosphate
  modified_base 11: mod_base = OTHER; note = adenosine-3'-phosphate
  modified_base 12: mod_base = OTHER; note = cytidine-3'-phosphate
  modified_base 13: mod_base = OTHER; note = uridine-3'-phosphate
  modified_base 14: mod_base = OTHER; note = 2'-O-methylcytidine-3'-phosphate
  modified_base 15: mod_base = OTHER; note = 2'-O-methylcytidine-3'-phosphate
  modified_base 16: mod_base = OTHER; note = adenosine-3'-phosphate
  modified_base 17: mod_base = OTHER; note = guanosine-3'-phosphate
  modified_base 18: mod_base = OTHER; note = guanosine-3'-phosphate
  modified_base 19: mod_base = OTHER; note = cytidine-3'-phosphate
  modified_base 20: mod_base = OTHER; note = 2'-deoxythymidine-3'-phosphorothioate
  misc_feature 1..19: note = RNA
  misc_feature 20..21: note = DNA
ttccgaataaactccaggctt

SEQ ID NO: 1411 - RNA, 19 nt, synthetic construct
  source 1..19: mol_type = other RNA
  modified_base 2: mod_base = OTHER; note = 2'-O-methoxyethylcytidine-3'-phosphate
  modified_base 4: mod_base = OTHER; note = 2'-O-methoxyethyluridine-3'-phosphate
  modified_base 6: mod_base = OTHER; note = 2'-O-methoxyethylguanosine-3'-phosphate
  modified_base 8: mod_base = OTHER; note = modified guanosine 3'-phosphate
  modified_base 10: mod_base = OTHER; note = 2'-O-methoxyethyluridine-3'-phosphate
  modified_base 12: mod_base = OTHER; note = 2'-O-methoxyethyladenosine-3'-phosphate
  modified_base 14: mod_base = OTHER; note = 2'-O-methoxyethyluridine-3'-phosphate
  modified_base 16: mod_base = OTHER; note = 2'-O-methoxyethylguanosine-3'-phosphate
  modified_base 18: mod_base = OTHER; note = 2'-O-methoxyethyladenosine-3'-phosphate
gcctggagtttattcggaa

SEQ ID NO: 1412 - RNA, 19 nt, synthetic construct
  source 1..19: mol_type = other RNA
  modified_base 6: mod_base = OTHER; note = 2'-O-methyladenosine-3'-phosphate
  modified_base 7: mod_base = OTHER; note = 2'-O-methyladenosine-3'-phosphate
  modified_base 10: mod_base = OTHER; note = 2'-O-methyladenosine-3'-phosphate
  modified_base 11: mod_base = OTHER; note = 2'-O-methyladenosine-3'-phosphate
  modified_base 17: mod_base = OTHER; note = 2'-O-methylguanosine-3'-phosphate
  modified_base 18: mod_base = OTHER; note = 2'-O-methylguanosine-3'-phosphate
  modified_base 19: mod_base = OTHER; note = 2'-O-methylcytidine
ttccgaataaactccaggc

SEQ ID NO: 1413 - RNA, 19 nt, synthetic construct
  source 1..19: mol_type = other RNA
  modified_base 2: mod_base = OTHER; note = 2'-O-methoxyethylcytidine-3'-phosphate
  modified_base 4: mod_base = OTHER; note = 2'-O-methoxyethyluridine-3'-phosphate
  modified_base 6: mod_base = OTHER; note = 2'-O-methoxyethylguanosine-3'-phosphate
  modified_base 8: mod_base = OTHER; note = modified guanosine 3'-phosphate
  modified_base 10: mod_base = OTHER; note = 2'-O-methoxyethyluridine-3'-phosphate
  modified_base 12: mod_base = OTHER; note = 2'-O-methoxyethyladenosine-3'-phosphate
  modified_base 14: mod_base = OTHER; note = 2'-O-methoxyethyluridine-3'-phosphate
  modified_base 16: mod_base = OTHER; note = 2'-O-methoxyethylguanosine-3'-phosphate
  modified_base 18: mod_base = OTHER; note = 2'-O-methoxyethyladenosine-3'-phosphate
gcctggagtttattcggaa

SEQ ID NO: 1414 - RNA, 19 nt, synthetic construct
  source 1..19: mol_type = other RNA
  modified_base 1: mod_base = OTHER; note = 2'-O-methyluridine-3'-phosphate 5'phosphate
  modified_base 2: mod_base = OTHER; note = 2'-deoxy-2'-fluorouridine-3'-phosphate
  modified_base 3: mod_base = OTHER; note = 2'-O-methylcytidine-3'-phosphate
  modified_base 4: mod_base = OTHER; note = 2'-deoxy-2'-fluorocytidine-3'-phosphate
  modified_base 5: mod_base = OTHER; note = 2'-O-methylguanosine-3'-phosphate
  modified_base 6: mod_base = OTHER; note = 2'-deoxy-2'-fluoroadenosine-3'-phosphate
  modified_base 7: mod_base = OTHER; note = 2'-O-methyladenosine-3'-phosphate
  modified_base 8: mod_base = OTHER; note = 2'-deoxy-2'-fluorouridine-3'-phosphate
  modified_base 9: mod_base = OTHER; note = 2'-O-methyladenosine-3'-phosphate
  modified_base 10: mod_base = OTHER; note = 2'-deoxy-2'-fluoroadenosine-3'-phosphate
  modified_base 11: mod_base = OTHER; note = 2'-O-methyladenosine-3'-phosphate
  modified_base 12: mod_base = OTHER; note = 2'-deoxy-2'-fluorocytidine-3'-phosphate
  modified_base 13: mod_base = OTHER; note = 2'-O-methyluridine-3'-phosphate
  modified_base 14: mod_base = OTHER; note = 2'-deoxy-2'-fluorocytidine-3'-phosphate
  modified_base 15: mod_base = OTHER; note = 2'-O-methylcytidine-3'-phosphate
  modified_base 16: mod_base = OTHER; note = 2'-deoxy-2'-fluoroadenosine-3'-phosphate
  modified_base 17: mod_base = OTHER; note = 2'-O-methylguanosine-3'-phosphate
  modified_base 18: mod_base = OTHER; note = 2'-deoxy-2'-fluoroguanosine-3'-phosphate
  modified_base 19: mod_base = OTHER; note = 2'-O-methylcytidine
ttccgaataaactccaggc

SEQ ID NO: 1415 - RNA, 19 nt, synthetic construct
  source 1..19: mol_type = other RNA
  modified_base 2: mod_base = OTHER; note = 2'-O-methoxyethylcytidine-3'-phosphate
  modified_base 4: mod_base = OTHER; note = 2'-O-methoxyethyluridine-3'-phosphate
  modified_base 6: mod_base = OTHER; note = 2'-O-methoxyethylguanosine-3'-phosphate
  modified_base 8: mod_base = OTHER; note = modified guanosine 3'-phosphate
  modified_base 10: mod_base = OTHER; note = 2'-O-methoxyethyluridine-3'-phosphate
  modified_base 12: mod_base = OTHER; note = 2'-O-methoxyethyladenosine-3'-phosphate
  modified_base 14: mod_base = OTHER; note = 2'-O-methoxyethyluridine-3'-phosphate
  modified_base 16: mod_base = OTHER; note = 2'-O-methoxyethylguanosine-3'-phosphate
  modified_base 18: mod_base = OTHER; note = 2'-O-methoxyethyladenosine-3'-phosphate
gcctggagtttattcggaa

SEQ ID NO: 1416 - RNA, 21 nt, synthetic construct
  source 1..21: mol_type = other RNA
  modified_base 1: mod_base = OTHER; note = 2'-O-methyluridine-3'-phosphate 5'phosphate
  modified_base 2: mod_base = OTHER; note = 2'-deoxy-2'-fluorouridine-3'-phosphate
  modified_base 3: mod_base = OTHER; note = 2'-O-methylcytidine-3'-phosphate
  modified_base 4: mod_base = OTHER; note = 2'-deoxy-2'-fluorocytidine-3'-phosphate
  modified_base 5: mod_base = OTHER; note = 2'-O-methylguanosine-3'-phosphate
  modified_base 6: mod_base = OTHER; note = 2'-deoxy-2'-fluoroadenosine-3'-phosphate
  modified_base 7: mod_base = OTHER; note = 2'-O-methyladenosine-3'-phosphate
  modified_base 8: mod_base = OTHER; note = 2'-deoxy-2'-fluorouridine-3'-phosphate
  modified_base 9: mod_base = OTHER; note = 2'-O-methyladenosine-3'-phosphate
  modified_base 10: mod_base = OTHER; note = 2'-deoxy-2'-fluoroadenosine-3'-phosphate
  modified_base 11: mod_base = OTHER; note = 2'-O-methyladenosine-3'-phosphate
  modified_base 12: mod_base = OTHER; note = 2'-deoxy-2'-fluorocytidine-3'-phosphate
  modified_base 13: mod_base = OTHER; note = 2'-O-methyluridine-3'-phosphate
  modified_base 14: mod_base = OTHER; note = 2'-deoxy-2'-fluorocytidine-3'-phosphate
  modified_base 15: mod_base = OTHER; note = 2'-O-methylcytidine-3'-phosphate
  modified_base 16: mod_base = OTHER; note = 2'-deoxy-2'-fluoroadenosine-3'-phosphate
  modified_base 17: mod_base = OTHER; note = 2'-O-methylguanosine-3'-phosphate
  modified_base 18: mod_base = OTHER; note = 2'-deoxy-2'-fluoroguanosine-3'-phosphate
  modified_base 19: mod_base = OTHER; note = 2'-O-methylcytidine-3'-phosphorothioate
  modified_base 20: mod_base = OTHER; note = 2'-deoxy-2'-fluorocytidine-3'-phosphorothioate
  modified_base 21: mod_base = OTHER; note = 2'-O-methyluridine
ttccgaataaactccaggcct

SEQ ID NO: 1417 - RNA, 19 nt, synthetic construct
  source 1..19: mol_type = other RNA
  modified_base 2: mod_base = OTHER; note = 2'-O-methoxyethylcytidine-3'-phosphate
  modified_base 4: mod_base = OTHER; note = 2'-O-methoxyethyluridine-3'-phosphate
  modified_base 6: mod_base = OTHER; note = 2'-O-methoxyethylguanosine-3'-phosphate
  modified_base 8: mod_base = OTHER; note = modified guanosine 3'-phosphate
  modified_base 10: mod_base = OTHER; note = 2'-O-methoxyethyluridine-3'-phosphate
  modified_base 12: mod_base = OTHER; note = 2'-O-methoxyethyladenosine-3'-phosphate
  modified_base 14: mod_base = OTHER; note = 2'-O-methoxyethyluridine-3'-phosphate
  modified_base 16: mod_base = OTHER; note = 2'-O-methoxyethylguanosine-3'-phosphate
  modified_base 18: mod_base = OTHER; note = 2'-O-methoxyethyladenosine-3'-phosphate
gcctggagtttattcggaa

SEQ ID NO: 1418 - RNA, 21 nt, synthetic construct
  source 1..21: mol_type = other RNA
  modified_base 19: mod_base = OTHER; note = cytidine-3'-phosphorothioate
  modified_base 20: mod_base = OTHER; note = 2'-O-methylcytidine-3'-phosphorothioate
  modified_base 21: mod_base = OTHER; note = 2'-O-methyluridine
ttccgaataaactccaggcct

SEQ ID NO: 1419 - RNA, 19 nt, synthetic construct
  source 1..19: mol_type = other RNA
  modified_base 2: mod_base = OTHER; note = 2'-O-methoxyethylcytidine-3'-phosphate
  modified_base 4: mod_base = OTHER; note = 2'-O-methoxyethyluridine-3'-phosphate
  modified_base 6: mod_base = OTHER; note = 2'-O-methoxyethylguanosine-3'-phosphate
  modified_base 8: mod_base = OTHER; note = modified guanosine 3'-phosphate
  modified_base 10: mod_base = OTHER; note = 2'-O-methoxyethyluridine-3'-phosphate
  modified_base 12: mod_base = OTHER; note = 2'-O-methoxyethyladenosine-3'-phosphate
  modified_base 14: mod_base = OTHER; note = 2'-O-methoxyethyluridine-3'-phosphate
  modified_base 16: mod_base = OTHER; note = 2'-O-methoxyethylguanosine-3'-phosphate
  modified_base 18: mod_base = OTHER; note = 2'-O-methoxyethyladenosine-3'-phosphate
gcctggagtttattcggaa

SEQ ID NO: 1420 - DNA, 21 bp, synthetic construct
  source 1..21: mol_type = other DNA
  modified_base 1: mod_base = OTHER; note = uridine-3'-phosphate
  modified_base 2: mod_base = OTHER; note = uridine-3'-phosphate
  modified_base 3: mod_base = OTHER; note = cytidine-3'-phosphate
  modified_base 4: mod_base = OTHER; note = cytidine-3'-phosphate
  modified_base 5: mod_base = OTHER; note = guanosine-3'-phosphate
  modified_base 6: mod_base = OTHER; note = adenosine-3'-phosphate
  modified_base 7: mod_base = OTHER; note = adenosine-3'-phosphate
  modified_base 8: mod_base = OTHER; note = 2'-O-methyluridine-3'-phosphate
  modified_base 9: mod_base = OTHER; note = adenosine-3'-phosphate
  modified_base 10: mod_base = OTHER; note = adenosine-3'-phosphate
  modified_base 11: mod_base = OTHER; note = adenosine-3'-phosphate
  modified_base 12: mod_base = OTHER; note = cytidine-3'-phosphate
  modified_base 13: mod_base = OTHER; note = uridine-3'-phosphate
  modified_base 14: mod_base = OTHER; note = cytidine-3'-phosphate
  modified_base 15: mod_base = OTHER; note = 2'-O-methylcytidine-3'-phosphate
  modified_base 16: mod_base = OTHER; note = adenosine-3'-phosphate
  modified_base 17: mod_base = OTHER; note = guanosine-3'-phosphate
  modified_base 18: mod_base = OTHER; note = guanosine-3'-phosphate
  modified_base 19: mod_base = OTHER; note = cytidine-3'-phosphate
  modified_base 20: mod_base = OTHER; note = 2'-deoxythymidine-3'-phosphorothioate
  misc_feature 1..19: note = RNA
  misc_feature 20..21: note = DNA
ttccgaataaactccaggctt

SEQ ID NO: 1421 - RNA, 19 nt, synthetic construct
  source 1..19: mol_type = other RNA
  modified_base 2: mod_base = OTHER; note = 2'-O-methoxyethylcytidine-3'-phosphate
  modified_base 4: mod_base = OTHER; note = 2'-O-methoxyethyluridine-3'-phosphate
  modified_base 6: mod_base = OTHER; note = 2'-O-methoxyethylguanosine-3'-phosphate
  modified_base 8: mod_base = OTHER; note = modified guanosine 3'-phosphate
  modified_base 10: mod_base = OTHER; note = 2'-O-methoxyethyluridine-3'-phosphate
  modified_base 12: mod_base = OTHER; note = 2'-O-methoxyethyladenosine-3'-phosphate
  modified_base 14: mod_base = OTHER; note = 2'-O-methoxyethyluridine-3'-phosphate
  modified_base 16: mod_base = OTHER; note = 2'-O-methoxyethylguanosine-3'-phosphate
  modified_base 18: mod_base = OTHER; note = 2'-O-methoxyethyladenosine-3'-phosphate
gcctggagtttattcggaa

SEQ ID NO: 1422 - DNA, 21 bp, synthetic construct
  source 1..21: mol_type = other DNA
  modified_base 1: mod_base = OTHER; note = 2'-O-methyluridine-3'-phosphate
  modified_base 2: mod_base = OTHER; note = uridine-3'-phosphate
  modified_base 3: mod_base = OTHER; note = 2'-O-methylcytidine-3'-phosphate
  modified_base 4: mod_base = OTHER; note = cytidine-3'-phosphate
  modified_base 5: mod_base = OTHER; note = guanosine-3'-phosphate
  modified_base 6: mod_base = OTHER; note = adenosine-3'-phosphate
  modified_base 7: mod_base = OTHER; note = adenosine-3'-phosphate
  modified_base 8: mod_base = OTHER; note = 2'-O-methyluridine-3'-phosphate
  modified_base 9: mod_base = OTHER; note = adenosine-3'-phosphate
  modified_base 10: mod_base = OTHER; note = adenosine-3'-phosphate
  modified_base 11: mod_base = OTHER; note = adenosine-3'-phosphate
  modified_base 12: mod_base = OTHER; note = cytidine-3'-phosphate
  modified_base 13: mod_base = OTHER; note = uridine-3'-phosphate
  modified_base 14: mod_base = OTHER; note = 2'-O-methylcytidine-3'-phosphate
  modified_base 15: mod_base = OTHER; note = 2'-O-methylcytidine-3'-phosphate
  modified_base 16: mod_base = OTHER; note = adenosine-3'-phosphate
  modified_base 17: mod_base = OTHER; note = guanosine-3'-phosphate
  modified_base 18: mod_base = OTHER; note = guanosine-3'-phosphate
  modified_base 19: mod_base = OTHER; note = cytidine-3'-phosphate
  modified_base 20: mod_base = OTHER; note = 2'-deoxythymidine-3'-phosphorothioate
  misc_feature 1..19: note = RNA
  misc_feature 20..21: note = DNA
ttccgaataaactccaggctt

SEQ ID NO: 1423 - RNA, 19 nt, synthetic construct
  source 1..19: mol_type = other RNA
  modified_base 2: mod_base = OTHER; note = 2'-O-methoxyethylcytidine-3'-phosphate
  modified_base 4: mod_base = OTHER; note = 2'-O-methoxyethyluridine-3'-phosphate
  modified_base 6: mod_base = OTHER; note = 2'-O-methoxyethylguanosine-3'-phosphate
  modified_base 8: mod_base = OTHER; note = modified guanosine 3'-phosphate
  modified_base 10: mod_base = OTHER; note = 2'-O-methoxyethyluridine-3'-phosphate
  modified_base 12: mod_base = OTHER; note = 2'-O-methoxyethyladenosine-3'-phosphate
  modified_base 14: mod_base = OTHER; note = 2'-O-methoxyethyluridine-3'-phosphate
  modified_base 16: mod_base = OTHER; note = 2'-O-methoxyethylguanosine-3'-phosphate
  modified_base 18: mod_base = OTHER; note = 2'-O-methoxyethyladenosine-3'-phosphate
gcctggagtttattcggaa

SEQ ID NO: 1424 - RNA, 21 nt, synthetic construct
  source 1..21: mol_type = other RNA
  modified_base 6: mod_base = OTHER; note = 2'-O-methyladenosine-3'-phosphate
  modified_base 7: mod_base = OTHER; note = 2'-O-methyladenosine-3'-phosphate
  modified_base 10: mod_base = OTHER; note = 2'-O-methyladenosine-3'-phosphate
  modified_base 11: mod_base = OTHER; note = 2'-O-methyladenosine-3'-phosphate
  modified_base 17: mod_base = OTHER; note = 2'-O-methylguanosine-3'-phosphate
  modified_base 18: mod_base = OTHER; note = 2'-O-methylguanosine-3'-phosphate
  modified_base 19: mod_base = OTHER; note = 2'-O-methylcytidine-3'-phosphorothioate
  modified_base 20: mod_base = OTHER; note = 2'-O-methylcytidine-3'-phosphorothioate
  modified_base 21: mod_base = OTHER; note = 2'-O-methyluridine
ttccgaataaactccaggcct

SEQ ID NO: 1425 - DNA, 21 bp, synthetic construct
  source 1..21: mol_type = other DNA
  modified_base 1: mod_base = OTHER; note = guanosine-3'-phosphate
  modified_base 2: mod_base = OTHER; note = 2'-O-methoxyethylcytidine-3'-phosphate
  modified_base 3: mod_base = OTHER; note = cytidine-3'-phosphate
  modified_base 4: mod_base = OTHER; note = 2'-O-methoxyethyluridine-3'-phosphate
  modified_base 5: mod_base = OTHER; note = guanosine-3'-phosphate
  modified_base 6: mod_base = OTHER; note = 2'-O-methoxyethylguanosine-3'-phosphate
  modified_base 7: mod_base = OTHER; note = adenosine-3'-phosphate
  modified_base 8: mod_base = OTHER; note = 2'-O-methoxyethylguanosine-3'-phosphate
  modified_base 9: mod_base = OTHER; note = uridine-3'-phosphate
  modified_base 10: mod_base = OTHER; note = 2'-O-methoxyethyluridine-3'-phosphate
  modified_base 11: mod_base = OTHER; note = uridine-3'-phosphate
  modified_base 12: mod_base = OTHER; note = 2'-O-methoxyethyladenosine-3'-phosphate
  modified_base 13: mod_base = OTHER; note = uridine-3'-phosphate
  modified_base 14: mod_base = OTHER; note = 2'-O-methoxyethyluridine-3'-phosphate
  modified_base 15: mod_base = OTHER; note = cytidine-3'-phosphate
  modified_base 16: mod_base = OTHER; note = 2'-O-methoxyethylguanosine-3'-phosphate
  modified_base 17: mod_base = OTHER; note = guanosine-3'-phosphate
  modified_base 18: mod_base = OTHER; note = 2'-O-methoxyethyladenosine-3'-phosphate
  modified_base 19: mod_base = OTHER; note = adenosine-3'-phosphate
  modified_base 20: mod_base = OTHER; note = 2'-deoxythymidine-3'-phosphorothioate
  misc_feature 1..19: note = RNA
  misc_feature 20..21: note = DNA
gcctggagtttattcggaatt

SEQ ID NO: 1426 - DNA, 21 bp, synthetic construct
  source 1..21: mol_type = other DNA
  modified_base 1: mod_base = OTHER; note = uridine-3'-phosphate
  modified_base 2: mod_base = OTHER; note = uridine-3'-phosphate
  modified_base 3: mod_base = OTHER; note = cytidine-3'-phosphate
  modified_base 4: mod_base = OTHER; note = cytidine-3'-phosphate
  modified_base 5: mod_base = OTHER; note = guanosine-3'-phosphate
  modified_base 6: mod_base = OTHER; note = 2'-O-methyladenosine-3'-phosphate
  modified_base 7: mod_base = OTHER; note = 2'-O-methyladenosine-3'-phosphate
  modified_base 8: mod_base = OTHER; note = uridine-3'-phosphate
  modified_base 9: mod_base = OTHER; note = adenosine-3'-phosphate
  modified_base 10: mod_base = OTHER; note = 2'-O-methyladenosine-3'-phosphate
  modified_base 11: mod_base = OTHER; note = 2'-O-methyladenosine-3'-phosphate
  modified_base 12: mod_base = OTHER; note = cytidine-3'-phosphate
  modified_base 13: mod_base = OTHER; note = uridine-3'-phosphate
  modified_base 14: mod_base = OTHER; note = cytidine-3'-phosphate
  modified_base 15: mod_base = OTHER; note = cytidine-3'-phosphate
  modified_base 16: mod_base = OTHER; note = adenosine-3'-phosphate
  modified_base 17: mod_base = OTHER; note = 2'-O-methylguanosine-3'-phosphate
  modified_base 18: mod_base = OTHER; note = 2'-O-methylguanosine-3'-phosphate
  modified_base 19: mod_base = OTHER; note = 2'-O-methylcytidine-3'-phosphate
  modified_base 20: mod_base = OTHER; note = 2'-deoxythymidine-3'-phosphorothioate
  misc_feature 1..19: note = RNA
  misc_feature 20..21: note = DNA
ttccgaataaactccaggctt

SEQ ID NO: 1427 - DNA, 21 bp, synthetic construct
  source 1..21: mol_type = other DNA
  modified_base 1: mod_base = OTHER; note = guanosine-3'-phosphate
  modified_base 2: mod_base = OTHER; note = 2'-O-methoxyethylcytidine-3'-phosphate
  modified_base 3: mod_base = OTHER; note = cytidine-3'-phosphate
  modified_base 4: mod_base = OTHER; note = 2'-O-methoxyethyluridine-3'-phosphate
  modified_base 5: mod_base = OTHER; note = guanosine-3'-phosphate
  modified_base 6: mod_base = OTHER; note = 2'-O-methoxyethylguanosine-3'-phosphate
  modified_base 7: mod_base = OTHER; note = adenosine-3'-phosphate
  modified_base 8: mod_base = OTHER; note = 2'-O-methoxyethylguanosine-3'-phosphate
  modified_base 9: mod_base = OTHER; note = uridine-3'-phosphate
  modified_base 10: mod_base = OTHER; note = 2'-O-methoxyethyluridine-3'-phosphate
  modified_base 11: mod_base = OTHER; note = uridine-3'-phosphate
  modified_base 12: mod_base = OTHER; note = 2'-O-methoxyethyladenosine-3'-phosphate
  modified_base 13: mod_base = OTHER; note = uridine-3'-phosphate
  modified_base 14: mod_base = OTHER; note = 2'-O-methoxyethyluridine-3'-phosphate
  modified_base 15: mod_base = OTHER; note = cytidine-3'-phosphate
  modified_base 16: mod_base = OTHER; note = 2'-O-methoxyethylguanosine-3'-phosphate
  modified_base 17: mod_base = OTHER; note = guanosine-3'-phosphate
  modified_base 18: mod_base = OTHER; note = 2'-O-methoxyethyladenosine-3'-phosphate
  modified_base 19: mod_base = OTHER; note = adenosine-3'-phosphate
  modified_base 20: mod_base = OTHER; note = 2'-deoxythymidine-3'-phosphorothioate
  misc_feature 1..19: note = RNA
  misc_feature 20..21: note = DNA
gcctggagtttattcggaatt

SEQ ID NO: 1428 - DNA, 21 bp, synthetic construct
  source 1..21: mol_type = other DNA
  modified_base 1: mod_base = OTHER; note = uridine-3'-phosphate
  modified_base 2: mod_base = OTHER; note = uridine-3'-phosphate
  modified_base 3: mod_base = OTHER; note = cytidine-3'-phosphate
  modified_base 4: mod_base = OTHER; note = cytidine-3'-phosphate
  modified_base 5: mod_base = OTHER; note = guanosine-3'-phosphate
  modified_base 6: mod_base = OTHER; note = adenosine-3'-phosphate
  modified_base 7: mod_base = OTHER; note = adenosine-3'-phosphate
  modified_base 8: mod_base = OTHER; note = 2'-O-methyluridine-3'-phosphate
  modified_base 9: mod_base = OTHER; note = adenosine-3'-phosphate
  modified_base 10: mod_base = OTHER; note = adenosine-3'-phosphate
  modified_base 11: mod_base = OTHER; note = adenosine-3'-phosphate
  modified_base 12: mod_base = OTHER; note = cytidine-3'-phosphate
  modified_base 13: mod_base = OTHER; note = uridine-3'-phosphate
  modified_base 14: mod_base = OTHER; note = cytidine-3'-phosphate
  modified_base 15: mod_base = OTHER; note = 2'-O-methylcytidine-3'-phosphate
  modified_base 16: mod_base = OTHER; note = adenosine-3'-phosphate
  modified_base 17: mod_base = OTHER; note = guanosine-3'-phosphate
  modified_base 18: mod_base = OTHER; note = guanosine-3'-phosphate
  modified_base 19: mod_base = OTHER; note = cytidine-3'-phosphate
  modified_base 20: mod_base = OTHER; note = 2'-deoxythymidine-3'-phosphorothioate
  misc_feature 1..19: note = RNA
  misc_feature 20..21: note = DNA
ttccgaataaactccaggctt

SEQ ID NO: 1429 - DNA, 21 bp, synthetic construct
  source 1..21: mol_type = other DNA
  modified_base 1: mod_base = OTHER; note = guanosine-3'-phosphate
  modified_base 2: mod_base = OTHER; note = 2'-O-methoxyethylcytidine-3'-phosphate
  modified_base 3: mod_base = OTHER; note = cytidine-3'-phosphate
  modified_base 4: mod_base = OTHER; note = 2'-O-methoxyethyluridine-3'-phosphate
  modified_base 5: mod_base = OTHER; note = guanosine-3'-phosphate
  modified_base 6: mod_base = OTHER; note = 2'-O-methoxyethylguanosine-3'-phosphate
  modified_base 7: mod_base = OTHER; note = adenosine-3'-phosphate
  modified_base 8: mod_base = OTHER; note = 2'-O-methoxyethylguanosine-3'-phosphate
  modified_base 9: mod_base = OTHER; note = uridine-3'-phosphate
  modified_base 10: mod_base = OTHER; note = 2'-O-methoxyethyluridine-3'-phosphate
  modified_base 11: mod_base = OTHER; note = uridine-3'-phosphate
  modified_base 12: mod_base = OTHER; note = 2'-O-methoxyethyladenosine-3'-phosphate
  modified_base 13: mod_base = OTHER; note = uridine-3'-phosphate
  modified_base 14: mod_base = OTHER; note = 2'-O-methoxyethyluridine-3'-phosphate
  modified_base 15: mod_base = OTHER; note = cytidine-3'-phosphate
  modified_base 16: mod_base = OTHER; note = 2'-O-methoxyethylguanosine-3'-phosphate
  modified_base 17: mod_base = OTHER; note = guanosine-3'-phosphate
  modified_base 18: mod_base = OTHER; note = 2'-O-methoxyethyladenosine-3'-phosphate
  modified_base 19: mod_base = OTHER; note = adenosine-3'-phosphate
  modified_base 20: mod_base = OTHER; note = 2'-deoxythymidine-3'-phosphorothioate
  misc_feature 1..19: note = RNA
  misc_feature 20..21: note = DNA
gcctggagtttattcggaatt

SEQ ID NO: 1430 - DNA, 21 bp, synthetic construct
  source 1..21: mol_type = other DNA
  modified_base 1: mod_base = OTHER; note = uridine-3'-phosphate
  modified_base 2: mod_base = OTHER; note = uridine-3'-phosphate
  modified_base 3: mod_base = OTHER; note = cytidine-3'-phosphate
  modified_base 4: mod_base = OTHER; note = cytidine-3'-phosphate
  modified_base 5: mod_base = OTHER; note = guanosine-3'-phosphate
  modified_base 6: mod_base = OTHER; note = adenosine-3'-phosphate
  modified_base 7: mod_base = OTHER; note = adenosine-3'-phosphate
  modified_base 8: mod_base = OTHER; note = uridine-3'-phosphate
  modified_base 9: mod_base = OTHER; note = adenosine-3'-phosphate
  modified_base 10: mod_base = OTHER; note = adenosine-3'-phosphate
  modified_base 11: mod_base = OTHER; note = adenosine-3'-phosphate
  modified_base 12: mod_base = OTHER; note = cytidine-3'-phosphate
  modified_base 13: mod_base = OTHER; note = uridine-3'-phosphate
  modified_base 14: mod_base = OTHER; note = cytidine-3'-phosphate
  modified_base 15: mod_base = OTHER; note = cytidine-3'-phosphate
  modified_base 16: mod_base = OTHER; note = adenosine-3'-phosphate
  modified_base 17: mod_base = OTHER; note = guanosine-3'-phosphate
  modified_base 18: mod_base = OTHER; note = guanosine-3'-phosphate
  modified_base 19: mod_base = OTHER; note = cytidine-3'-phosphate
  modified_base 20: mod_base = OTHER; note = 2'-deoxythymidine-3'-phosphorothioate
  misc_feature 1..19: note = RNA
  misc_feature 20..21: note = DNA
ttccgaataaactccaggctt

SEQ ID NO: 1431 - DNA, 21 bp, synthetic construct
  source 1..21: mol_type = other DNA
  modified_base 1: mod_base = OTHER; note = guanosine-3'-phosphate
  modified_base 2: mod_base = OTHER; note = 2'-O-methoxyethylcytidine-3'-phosphate
  modified_base 3: mod_base = OTHER; note = 2'-O-methoxyethylcytidine-3'-phosphate
  modified_base 4: mod_base = OTHER; note = 2'-O-methoxyethyluridine-3'-phosphate
  modified_base 5: mod_base = OTHER; note = guanosine-3'-phosphate
  modified_base 6: mod_base = OTHER; note = guanosine-3'-phosphate
  modified_base 7: mod_base = OTHER; note = adenosine-3'-phosphate
  modified_base 8: mod_base = OTHER; note = guanosine-3'-phosphate
  modified_base 9: mod_base = OTHER; note = 2'-O-methoxyethyluridine-3'-phosphate
  modified_base 10: mod_base = OTHER; note = 2'-O-methoxyethyluridine-3'-phosphate
  modified_base 11: mod_base = OTHER; note = 2'-O-methoxyethyluridine-3'-phosphate
  modified_base 12: mod_base = OTHER; note = adenosine-3'-phosphate
  modified_base 13: mod_base = OTHER; note = 2'-O-methoxyethyluridine-3'-phosphate
  modified_base 14: mod_base = OTHER; note = 2'-O-methoxyethyluridine-3'-phosphate
  modified_base 15: mod_base = OTHER; note = 2'-O-methoxyethylcytidine-3'-phosphate
  modified_base 16: mod_base = OTHER; note = guanosine-3'-phosphate
  modified_base 17: mod_base = OTHER; note = guanosine-3'-phosphate
  modified_base 18: mod_base = OTHER; note = adenosine-3'-phosphate
  modified_base 19: mod_base = OTHER; note = adenosine-3'-phosphate
  modified_base 20: mod_base = OTHER; note = 2'-deoxythymidine-3'-phosphorothioate
  misc_feature 1..19: note = RNA
  misc_feature 20..21: note = DNA
gcctggagtttattcggaatt

SEQ ID NO: 1432 - DNA, 21 bp, synthetic construct
  source 1..21: mol_type = other DNA
  modified_base 1: mod_base = OTHER; note = uridine-3'-phosphate
  modified_base 2: mod_base = OTHER; note = uridine-3'-phosphate
  modified_base 3: mod_base = OTHER; note = cytidine-3'-phosphate
  modified_base 4: mod_base = OTHER; note = cytidine-3'-phosphate
  modified_base 5: mod_base = OTHER; note = guanosine-3'-phosphate
  modified_base 6: mod_base = OTHER; note = 2'-O-methyladenosine-3'-phosphate
  modified_base 7: mod_base = OTHER; note = 2'-O-methyladenosine-3'-phosphate
  modified_base 8: mod_base = OTHER; note = uridine-3'-phosphate
  modified_base 9: mod_base = OTHER; note = adenosine-3'-phosphate
  modified_base 10: mod_base = OTHER; note = 2'-O-methyladenosine-3'-phosphate
  modified_base 11: mod_base = OTHER; note = 2'-O-methyladenosine-3'-phosphate
  modified_base 12: mod_base = OTHER; note = cytidine-3'-phosphate
  modified_base 13: mod_base = OTHER; note = uridine-3'-phosphate
  modified_base 14: mod_base = OTHER; note = cytidine-3'-phosphate
  modified_base 15: mod_base = OTHER; note = cytidine-3'-phosphate
  modified_base 16: mod_base = OTHER; note = adenosine-3'-phosphate
  modified_base 17: mod_base = OTHER; note = 2'-O-methylguanosine-3'-phosphate
  modified_base 18: mod_base = OTHER; note = 2'-O-methylguanosine-3'-phosphate
  modified_base 19: mod_base = OTHER; note = 2'-O-methylcytidine-3'-phosphate
  modified_base 20: mod_base = OTHER; note = 2'-deoxythymidine-3'-phosphorothioate
  misc_feature 1..19: note = RNA
  misc_feature 20..21: note = DNA
ttccgaataaactccaggctt

SEQ ID NO: 1433 - DNA, 21 bp, synthetic construct
  source 1..21: mol_type = other DNA
  modified_base 1: mod_base = OTHER; note = guanosine-3'-phosphate
  modified_base 2: mod_base = OTHER; note = 2'-O-methoxyethylcytidine-3'-phosphate
  modified_base 3: mod_base = OTHER; note = 2'-O-methoxyethylcytidine-3'-phosphate
  modified_base 4: mod_base = OTHER; note = 2'-O-methoxyethyluridine-3'-phosphate
  modified_base 5: mod_base = OTHER; note = guanosine-3'-phosphate
  modified_base 6: mod_base = OTHER; note = guanosine-3'-phosphate
  modified_base 7: mod_base = OTHER; note = adenosine-3'-phosphate
  modified_base 8: mod_base = OTHER; note = guanosine-3'-phosphate
  modified_base 9: mod_base = OTHER; note = 2'-O-methoxyethyluridine-3'-phosphate
  modified_base 10: mod_base = OTHER; note = 2'-O-methoxyethyluridine-3'-phosphate
  modified_base 11: mod_base = OTHER; note = 2'-O-methoxyethyluridine-3'-phosphate
  modified_base 12: mod_base = OTHER; note = adenosine-3'-phosphate
  modified_base 13: mod_base = OTHER; note = 2'-O-methoxyethyluridine-3'-phosphate
  modified_base 14: mod_base = OTHER; note = 2'-O-methoxyethyluridine-3'-phosphate
  modified_base 15: mod_base = OTHER; note = 2'-O-methoxyethylcytidine-3'-phosphate
  modified_base 16: mod_base = OTHER; note = guanosine-3'-phosphate
  modified_base 17: mod_base = OTHER; note = guanosine-3'-phosphate
  modified_base 18: mod_base = OTHER; note = adenosine-3'-phosphate
  modified_base 19: mod_base = OTHER; note = adenosine-3'-phosphate
  modified_base 20: mod_base = OTHER; note = 2'-deoxythymidine-3'-phosphorothioate
  misc_feature 1..19: note = RNA
  misc_feature 20..21: note = DNA
gcctggagtttattcggaatt

SEQ ID NO: 1434 - DNA, 21 bp, synthetic construct
  source 1..21: mol_type = other DNA
  modified_base 1: mod_base = OTHER; note = uridine-3'-phosphate
  modified_base 2: mod_base = OTHER; note = uridine-3'-phosphate
  modified_base 3: mod_base = OTHER; note = cytidine-3'-phosphate
  modified_base 4: mod_base = OTHER; note = cytidine-3'-phosphate
  modified_base 5: mod_base = OTHER; note = guanosine-3'-phosphate
  modified_base 6: mod_base = OTHER; note = adenosine-3'-phosphate
  modified_base 7: mod_base = OTHER; note = adenosine-3'-phosphate
  modified_base 8: mod_base = OTHER; note = 2'-O-methyluridine-3'-phosphate
  modified_base 9: mod_base = OTHER; note = adenosine-3'-phosphate
  modified_base 10: mod_base = OTHER; note = adenosine-3'-phosphate
  modified_base 11: mod_base = OTHER; note = adenosine-3'-phosphate
  modified_base 12: mod_base = OTHER; note = cytidine-3'-phosphate
  modified_base 13: mod_base = OTHER; note = uridine-3'-phosphate
  modified_base 14: mod_base = OTHER; note = cytidine-3'-phosphate
  modified_base 15: mod_base = OTHER; note = 2'-O-methylcytidine-3'-phosphate
  modified_base 16: mod_base = OTHER; note = adenosine-3'-phosphate
  modified_base 17: mod_base = OTHER; note = guanosine-3'-phosphate
  modified_base 18: mod_base = OTHER; note = guanosine-3'-phosphate
  modified_base 19: mod_base = OTHER; note = cytidine-3'-phosphate
  modified_base 20: mod_base = OTHER; note = 2'-deoxythymidine-3'-phosphorothioate
  misc_feature 1..19: note = RNA
  misc_feature 20..21: note = DNA
ttccgaataaactccaggctt

SEQ ID NO: 1435 - DNA, 21 bp, synthetic construct
  source 1..21: mol_type = other DNA
  modified_base 1: mod_base = OTHER; note = guanosine-3'-phosphate
  modified_base 2: mod_base = OTHER; note = 2'-O-methoxyethylcytidine-3'-phosphate
  modified_base 3: mod_base = OTHER; note = 2'-O-methoxyethylcytidine-3'-phosphate
  modified_base 4: mod_base = OTHER; note = 2'-O-methoxyethyluridine-3'-phosphate
  modified_base 5: mod_base = OTHER; note = guanosine-3'-phosphate
  modified_base 6: mod_base = OTHER; note = guanosine-3'-phosphate
  modified_base 7: mod_base = OTHER; note = adenosine-3'-phosphate
  modified_base 8: mod_base = OTHER; note = guanosine-3'-phosphate
  modified_base 9: mod_base = OTHER; note = 2'-O-methoxyethyluridine-3'-phosphate
  modified_base 10: mod_base = OTHER; note = 2'-O-methoxyethyluridine-3'-phosphate
  modified_base 11: mod_base = OTHER; note = 2'-O-methoxyethyluridine-3'-phosphate
  modified_base 12: mod_base = OTHER; note = adenosine-3'-phosphate
  modified_base 13: mod_base = OTHER; note = 2'-O-methoxyethyluridine-3'-phosphate
  modified_base 14: mod_base = OTHER; note = 2'-O-methoxyethyluridine-3'-phosphate
  modified_base 15: mod_base = OTHER; note = 2'-O-methoxyethylcytidine-3'-phosphate
  modified_base 16: mod_base = OTHER; note = guanosine-3'-phosphate
  modified_base 17: mod_base = OTHER; note = guanosine-3'-phosphate
  modified_base 18: mod_base = OTHER; note = adenosine-3'-phosphate
  modified_base 19: mod_base = OTHER; note = adenosine-3'-phosphate
  modified_base 20: mod_base = OTHER; note = 2'-deoxythymidine-3'-phosphorothioate
  misc_feature 1..19: note = RNA
  misc_feature 20..21: note = DNA
gcctggagtttattcggaatt

SEQ ID NO: 1436 - DNA, 21 bp, synthetic construct
  source 1..21: mol_type = other DNA
  modified_base 1: mod_base = OTHER; note = uridine-3'-phosphate
  modified_base 2: mod_base = OTHER; note = uridine-3'-phosphate
  modified_base 3: mod_base = OTHER; note = cytidine-3'-phosphate
  modified_base 4: mod_base = OTHER; note = cytidine-3'-phosphate
  modified_base 5: mod_base = OTHER; note = guanosine-3'-phosphate
  modified_base 6: mod_base = OTHER; note = adenosine-3'-phosphate
  modified_base 7: mod_base = OTHER; note = adenosine-3'-phosphate
  modified_base 8: mod_base = OTHER; note = uridine-3'-phosphate
  modified_base 9: mod_base = OTHER; note = adenosine-3'-phosphate
  modified_base 10: mod_base = OTHER; note = adenosine-3'-phosphate
  modified_base 11: mod_base = OTHER; note = adenosine-3'-phosphate
  modified_base 12: mod_base = OTHER; note = cytidine-3'-phosphate
  modified_base 13: mod_base = OTHER; note = uridine-3'-phosphate
  modified_base 14: mod_base = OTHER; note = cytidine-3'-phosphate
  modified_base 15: mod_base = OTHER; note = cytidine-3'-phosphate
  modified_base 16: mod_base = OTHER; note = adenosine-3'-phosphate
  modified_base 17: mod_base = OTHER; note = guanosine-3'-phosphate
  modified_base 18: mod_base = OTHER; note = guanosine-3'-phosphate
  modified_base 19: mod_base = OTHER; note = cytidine-3'-phosphate
  modified_base 20: mod_base = OTHER; note = 2'-deoxythymidine-3'-phosphorothioate
  misc_feature 1..19: note = RNA
  misc_feature 20..21: note = DNA
ttccgaataaactccaggctt

SEQ ID NO: 1437 - DNA, 21 bp, synthetic construct
  source 1..21: mol_type = other DNA
  modified_base 1: mod_base = OTHER; note = guanosine-3'-phosphate
  modified_base 2: mod_base = OTHER; note = 2'-O-methoxyethylcytidine-3'-phosphate
  modified_base 3: mod_base = OTHER; note = 2'-O-methoxyethylcytidine-3'-phosphate
  modified_base 4: mod_base = OTHER; note = 2'-O-methoxyethyluridine-3'-phosphate
  modified_base 5: mod_base = OTHER; note = guanosine-3'-phosphate
  modified_base 6: mod_base = OTHER; note = guanosine-3'-phosphate
  modified_base 7: mod_base = OTHER; note = adenosine-3'-phosphate
  modified_base 8: mod_base = OTHER; note = guanosine-3'-phosphate
  modified_base 9: mod_base = OTHER; note = 2'-O-methoxyethyluridine-3'-phosphate
  modified_base 10: mod_base = OTHER; note = 2'-O-methoxyethyluridine-3'-phosphate
  modified_base 11: mod_base = OTHER; note = 2'-O-methoxyethyluridine-3'-phosphate
  modified_base 12: mod_base = OTHER; note = adenosine-3'-phosphate
  modified_base 13: mod_base = OTHER; note = 2'-O-methoxyethyluridine-3'-phosphate
  modified_base 14: mod_base = OTHER; note = 2'-O-methoxyethyluridine-3'-phosphate
  modified_base 15: mod_base = OTHER; note = 2'-O-methoxyethylcytidine-3'-phosphate
  modified_base 16: mod_base = OTHER; note = guanosine-3'-phosphate
  modified_base 17: mod_base = OTHER; note = guanosine-3'-phosphate
  modified_base 18: mod_base = OTHER; note = adenosine-3'-phosphate
  modified_base 19: mod_base = OTHER; note = adenosine-3'-phosphate
  modified_base 20: mod_base = OTHER; note = 2'-deoxythymidine-3'-phosphorothioate
  misc_feature 1..19: note = RNA
  misc_feature 20..21: note = DNA
gcctggagtttattcggaatt

SEQ ID NO: 1438 - DNA, 21 bp, synthetic construct
  source 1..21: mol_type = other DNA
  modified_base 1: mod_base = OTHER; note = 2'-deoxy-2'-fluorouridine-3'-phosphate 5'phosphate
  modified_base 2: mod_base = OTHER; note = 2'-deoxy-2'-fluorouridine-3'-phosphate
  modified_base 3: mod_base = OTHER; note = 2'-deoxy-2'-fluorocytidine-3'-phosphate
  modified_base 4: mod_base = OTHER; note = 2'-deoxy-2'-fluorocytidine-3'-phosphate
  modified_base 5: mod_base = OTHER; note = guanosine-3'-phosphate
  modified_base 6: mod_base = OTHER; note = adenosine-3'-phosphate
  modified_base 7: mod_base = OTHER; note = adenosine-3'-phosphate
  modified_base 8: mod_base = OTHER; note = 2'-deoxy-2'-fluorouridine-3'-phosphate
  modified_base 9: mod_base = OTHER; note = adenosine-3'-phosphate
  modified_base 10: mod_base = OTHER; note = adenosine-3'-phosphate
  modified_base 11: mod_base = OTHER; note = adenosine-3'-phosphate
  modified_base 12: mod_base = OTHER; note = 2'-deoxy-2'-fluorocytidine-3'-phosphate
  modified_base 13: mod_base = OTHER; note = 2'-deoxy-2'-fluorouridine-3'-phosphate
  modified_base 14: mod_base = OTHER; note = 2'-deoxy-2'-fluorocytidine-3'-phosphate
  modified_base 15: mod_base = OTHER; note = 2'-deoxy-2'-fluorocytidine-3'-phosphate
  modified_base 16: mod_base = OTHER; note = adenosine-3'-phosphate
  modified_base 17: mod_base = OTHER; note = guanosine-3'-phosphate
  modified_base 18: mod_base = OTHER; note = guanosine-3'-phosphate
  modified_base 19: mod_base = OTHER; note = 2'-deoxy-2'-fluorocytidine-3'-phosphate
  modified_base 20: mod_base = OTHER; note = 2'-deoxythymidine-3'-phosphorothioate
  misc_feature 1..19: note = RNA
  misc_feature 20..21: note = DNA
ttccgaataaactccaggctt

SEQ ID NO: 1439 - DNA, 21 bp, synthetic construct
  source 1..21: mol_type = other DNA
  modified_base 1: mod_base = OTHER; note = guanosine-3'-phosphate
  modified_base 2: mod_base = OTHER; note = 2'-O-methoxyethylcytidine-3'-phosphate
  modified_base 3: mod_base = OTHER; note = 2'-O-methoxyethylcytidine-3'-phosphate
  modified_base 4: mod_base = OTHER; note = 2'-O-methoxyethyluridine-3'-phosphate
  modified_base 5: mod_base = OTHER; note = guanosine-3'-phosphate
  modified_base 6: mod_base = OTHER; note = guanosine-3'-phosphate
  modified_base 7: mod_base = OTHER; note = adenosine-3'-phosphate
  modified_base 8: mod_base = OTHER; note = guanosine-3'-phosphate
  modified_base 9: mod_base = OTHER; note = 2'-O-methoxyethyluridine-3'-phosphate
  modified_base 10: mod_base = OTHER; note = 2'-O-methoxyethyluridine-3'-phosphate
  modified_base 11: mod_base = OTHER; note = 2'-O-methoxyethyluridine-3'-phosphate
  modified_base 12: mod_base = OTHER; note = adenosine-3'-phosphate
  modified_base 13: mod_base = OTHER; note = 2'-O-methoxyethyluridine-3'-phosphate
  modified_base 14: mod_base = OTHER; note = 2'-O-methoxyethyluridine-3'-phosphate
  modified_base 15: mod_base = OTHER; note = 2'-O-methoxyethylcytidine-3'-phosphate
  modified_base 16: mod_base = OTHER; note = guanosine-3'-phosphate
  modified_base 17: mod_base = OTHER; note = guanosine-3'-phosphate
  modified_base 18: mod_base = OTHER; note = adenosine-3'-phosphate
  modified_base 19: mod_base = OTHER; note = adenosine-3'-phosphate
  modified_base 20: mod_base = OTHER; note = 2'-deoxythymidine-3'-phosphorothioate
  misc_feature 1..19: note = RNA
  misc_feature 20..21: note = DNA
gcctggagtttattcggaatt

SEQ ID NO: 1440 - RNA, 21 nt, synthetic construct
  source 1..21: mol_type = other RNA
  modified_base 1: mod_base = OTHER; note = 2'-deoxy-2'-fluorouridine-3'-phosphate 5'phosphate
  modified_base 2: mod_base = OTHER; note = 2'-deoxy-2'-fluorouridine-3'-phosphate
  modified_base 3: mod_base = OTHER; note = 2'-deoxy-2'-fluorocytidine-3'-phosphate
  modified_base 4: mod_base = OTHER; note = 2'-deoxy-2'-fluorocytidine-3'-phosphate
  modified_base 8: mod_base = OTHER; note = 2'-deoxy-2'-fluorouridine-3'-phosphate
  modified_base 12: mod_base = OTHER; note = 2'-deoxy-2'-fluorocytidine-3'-phosphate
  modified_base 13: mod_base = OTHER; note = 2'-deoxy-2'-fluorouridine-3'-phosphate
  modified_base 14: mod_base = OTHER; note = 2'-deoxy-2'-fluorocytidine-3'-phosphate
  modified_base 15: mod_base = OTHER; note = 2'-deoxy-2'-fluorocytidine-3'-phosphate
  modified_base 19: mod_base = OTHER; note = 2'-deoxy-2'-fluorocytidine-3'-phosphorothioate
  modified_base 20: mod_base = OTHER; note = 2'-deoxy-2'-fluorocytidine-3'-phosphorothioate
  modified_base 21: mod_base = OTHER; note = 2'-deoxy-2'-fluorouridine
ttccgaataaactccaggcct

SEQ ID NO: 1441 - DNA, 21 bp, synthetic construct
  source 1..21: mol_type = other DNA
  modified_base 1: mod_base = OTHER; note = guanosine-3'-phosphate
  modified_base 2: mod_base = OTHER; note = 2'-O-methoxyethylcytidine-3'-phosphate
  modified_base 3: mod_base = OTHER; note = 2'-O-methoxyethylcytidine-3'-phosphate
  modified_base 4: mod_base = OTHER; note = 2'-O-methoxyethyluridine-3'-phosphate
  modified_base 5: mod_base = OTHER; note = guanosine-3'-phosphate
  modified_base 6: mod_base = OTHER; note = guanosine-3'-phosphate
  modified_base 7: mod_base = OTHER; note = adenosine-3'-phosphate
  modified_base 8: mod_base = OTHER; note = guanosine-3'-phosphate
  modified_base 9: mod_base = OTHER; note = 2'-O-methoxyethyluridine-3'-phosphate
  modified_base 10: mod_base = OTHER; note = 2'-O-methoxyethyluridine-3'-phosphate
  modified_base 11: mod_base = OTHER; note = 2'-O-methoxyethyluridine-3'-phosphate
  modified_base 12: mod_base = OTHER; note = adenosine-3'-phosphate
  modified_base 13: mod_base = OTHER; note = 2'-O-methoxyethyluridine-3'-phosphate
  modified_base 14: mod_base = OTHER; note = 2'-O-methoxyethyluridine-3'-phosphate
  modified_base 15: mod_base = OTHER; note = 2'-O-methoxyethylcytidine-3'-phosphate
  modified_base 16: mod_base = OTHER; note = guanosine-3'-phosphate
  modified_base 17: mod_base = OTHER; note = guanosine-3'-phosphate
  modified_base 18: mod_base = OTHER; note = adenosine-3'-phosphate
  modified_base 19: mod_base = OTHER; note = adenosine-3'-phosphate
  modified_base 20: mod_base = OTHER; note = 2'-deoxythymidine-3'-phosphorothioate
  misc_feature 1..19: note = RNA
  misc_feature 20..21: note = DNA
gcctggagtttattcggaatt

SEQ ID NO: 1442 - RNA, 21 nt, synthetic construct
  source 1..21: mol_type = other RNA
  modified_base 1: mod_base = OTHER; note = 2'-O-methyluridine-3'-phosphate 5'phosphate
  modified_base 2: mod_base = OTHER; note = 2'-deoxy-2'-fluorouridine-3'-phosphate
  modified_base 3: mod_base = OTHER; note = 2'-O-methylcytidine-3'-phosphate
  modified_base 4: mod_base = OTHER; note = 2'-deoxy-2'-fluorocytidine-3'-phosphate
  modified_base 5: mod_base = OTHER; note = 2'-O-methylguanosine-3'-phosphate
  modified_base 6: mod_base = OTHER; note = 2'-deoxy-2'-fluoroadenosine-3'-phosphate
  modified_base 7: mod_base = OTHER; note = 2'-O-methyladenosine-3'-phosphate
  modified_base 8: mod_base = OTHER; note = 2'-deoxy-2'-fluorouridine-3'-phosphate
  modified_base 9: mod_base = OTHER; note = 2'-O-methyladenosine-3'-phosphate
  modified_base 10: mod_base = OTHER; note = 2'-deoxy-2'-fluoroadenosine-3'-phosphate
  modified_base 11: mod_base = OTHER; note = 2'-O-methyladenosine-3'-phosphate
  modified_base 12: mod_base = OTHER; note = 2'-deoxy-2'-fluorocytidine-3'-phosphate
  modified_base 13: mod_base = OTHER; note = 2'-O-methyluridine-3'-phosphate
  modified_base 14: mod_base = OTHER; note = 2'-deoxy-2'-fluorocytidine-3'-phosphate
  modified_base 15: mod_base = OTHER; note = 2'-O-methylcytidine-3'-phosphate
  modified_base 16: mod_base = OTHER; note = 2'-deoxy-2'-fluoroadenosine-3'-phosphate
  modified_base 17: mod_base = OTHER; note = 2'-O-methylguanosine-3'-phosphate
  modified_base 18: mod_base = OTHER; note = 2'-deoxy-2'-fluoroguanosine-3'-phosphate
  modified_base 19: mod_base = OTHER; note = 2'-O-methylcytidine-3'-phosphorothioate
  modified_base 20: mod_base = OTHER; note = 2'-deoxy-2'-fluorocytidine-3'-phosphorothioate
  modified_base 21: mod_base = OTHER; note = 2'-O-methyluridine
ttccgaataaactccaggcct

SEQ ID NO: 1443 - DNA, 21 bp, synthetic construct
  source 1..21: mol_type = other DNA
  modified_base 1: mod_base = OTHER; note = guanosine-3'-phosphate
  modified_base 2: mod_base = OTHER; note = 2'-O-methoxyethylcytidine-3'-phosphate
  modified_base 3: mod_base = OTHER; note = 2'-O-methoxyethylcytidine-3'-phosphate
  modified_base 4: mod_base = OTHER; note = 2'-O-methoxyethyluridine-3'-phosphate
  modified_base 5: mod_base = OTHER; note = guanosine-3'-phosphate
  modified_base 6: mod_base = OTHER; note = guanosine-3'-phosphate
  modified_base 7: mod_base = OTHER; note = adenosine-3'-phosphate
  modified_base 8: mod_base = OTHER; note = guanosine-3'-phosphate
  modified_base 9: mod_base = OTHER; note = 2'-O-methoxyethyluridine-3'-phosphate
  modified_base 10: mod_base = OTHER; note = 2'-O-methoxyethyluridine-3'-phosphate
  modified_base 11: mod_base = OTHER; note = 2'-O-methoxyethyluridine-3'-phosphate
  modified_base 12: mod_base = OTHER; note = adenosine-3'-phosphate
  modified_base 13: mod_base = OTHER; note = 2'-O-methoxyethyluridine-3'-phosphate
  modified_base 14: mod_base = OTHER; note = 2'-O-methoxyethyluridine-3'-phosphate
  modified_base 15: mod_base = OTHER; note = 2'-O-methoxyethylcytidine-3'-phosphate
  modified_base 16: mod_base = OTHER; note = guanosine-3'-phosphate
  modified_base 17: mod_base = OTHER; note = guanosine-3'-phosphate
  modified_base 18: mod_base = OTHER; note = adenosine-3'-phosphate
  modified_base 19: mod_base = OTHER; note = adenosine-3'-phosphate
  modified_base 20: mod_base = OTHER; note = 2'-deoxythymidine-3'-phosphorothioate
  misc_feature 1..19: note = RNA
  misc_feature 20..21: note = DNA
gcctggagtttattcggaatt

SEQ ID NO: 1444 - DNA, 21 bp, synthetic construct
  source 1..21: mol_type = other DNA
  modified_base 1: mod_base = OTHER; note = uridine-3'-phosphate
  modified_base 2: mod_base = OTHER; note = uridine-3'-phosphate
  modified_base 3: mod_base = OTHER; note = cytidine-3'-phosphate
  modified_base 4: mod_base = OTHER; note = cytidine-3'-phosphate
  modified_base 5: mod_base = OTHER; note = guanosine-3'-phosphate
  modified_base 6: mod_base = OTHER; note = adenosine-3'-phosphate
  modified_base 7: mod_base = OTHER; note = adenosine-3'-phosphate
  modified_base 8: mod_base = OTHER; note = uridine-3'-phosphate
  modified_base 9: mod_base = OTHER; note = adenosine-3'-phosphate
  modified_base 10: mod_base = OTHER; note = adenosine-3'-phosphate
  modified_base 11: mod_base = OTHER; note = adenosine-3'-phosphate
  modified_base 12: mod_base = OTHER; note = cytidine-3'-phosphate
  modified_base 13: mod_base = OTHER; note = uridine-3'-phosphate
  modified_base 14: mod_base = OTHER; note = cytidine-3'-phosphate
  modified_base 15: mod_base = OTHER; note = cytidine-3'-phosphate
  modified_base 16: mod_base = OTHER; note = adenosine-3'-phosphate
  modified_base 17: mod_base = OTHER; note = guanosine-3'-phosphate
  modified_base 18: mod_base = OTHER; note = guanosine-3'-phosphate
  modified_base 19: mod_base = OTHER; note = cytidine-3'-phosphate
  modified_base 20: mod_base = OTHER; note = 2'-deoxythymidine-3'-phosphorothioate
  misc_feature 1..19: note = RNA
  misc_feature 20..21: note = DNA
ttccgaataaactccaggctt

SEQ ID NO: 1445 - DNA, 21 bp, synthetic construct
  source 1..21: mol_type = other DNA
  modified_base 1: mod_base = OTHER; note = guanosine-3'-phosphate
  modified_base 2: mod_base = OTHER; note = 2'-deoxy-2'-fluorocytidine-3'-phosphate
  modified_base 3: mod_base = OTHER; note = 2'-deoxy-2'-fluorocytidine-3'-phosphate
  modified_base 4: mod_base = OTHER; note = 2'-deoxy-2'-fluorouridine-3'-phosphate
  modified_base 5: mod_base = OTHER; note = guanosine-3'-phosphate
  modified_base 6: mod_base = OTHER; note = guanosine-3'-phosphate
  modified_base 7: mod_base = OTHER; note = adenosine-3'-phosphate
  modified_base 8: mod_base = OTHER; note = guanosine-3'-phosphate
  modified_base 9: mod_base = OTHER; note = 2'-deoxy-2'-fluorouridine-3'-phosphate
  modified_base 10: mod_base = OTHER; note = 2'-deoxy-2'-fluorouridine-3'-phosphate
  modified_base 11: mod_base = OTHER; note = 2'-deoxy-2'-fluorouridine-3'-phosphate
  modified_base 12: mod_base = OTHER; note = adenosine-3'-phosphate
  modified_base 13: mod_base = OTHER; note = 2'-deoxy-2'-fluorouridine-3'-phosphate
  modified_base 14: mod_base = OTHER; note = 2'-deoxy-2'-fluorouridine-3'-phosphate
  modified_base 15: mod_base = OTHER; note = 2'-deoxy-2'-fluorocytidine-3'-phosphate
  modified_base 16: mod_base = OTHER; note = guanosine-3'-phosphate
  modified_base 17: mod_base = OTHER; note = guanosine-3'-phosphate
  modified_base 18: mod_base = OTHER; note = adenosine-3'-phosphate
  modified_base 19: mod_base = OTHER; note = adenosine-3'-phosphate
  modified_base 20: mod_base = OTHER; note = 2'-deoxythymidine-3'-phosphorothioate
  misc_feature 1..19: note = RNA
  misc_feature 20..21: note = DNA
gcctggagtttattcggaatt

SEQ ID NO: 1446 - DNA, 21 bp, synthetic construct
  source 1..21: mol_type = other DNA
  modified_base 1: mod_base = OTHER; note = 2'-deoxy-2'-fluorouridine-3'-phosphate
  modified_base 2: mod_base = OTHER; note = 2'-deoxy-2'-fluorouridine-3'-phosphate
  modified_base 3: mod_base = OTHER; note = 2'-deoxy-2'-fluorocytidine-3'-phosphate
  modified_base 4: mod_base = OTHER; note = 2'-deoxy-2'-fluorocytidine-3'-phosphate
  modified_base 5: mod_base = OTHER; note = guanosine-3'-phosphate
  modified_base 6: mod_base = OTHER; note = adenosine-3'-phosphate
  modified_base 7: mod_base = OTHER; note = adenosine-3'-phosphate
  modified_base 8: mod_base = OTHER; note = 2'-deoxy-2'-fluorouridine-3'-phosphate
  modified_base 9: mod_base = OTHER; note = adenosine-3'-phosphate
  modified_base 10: mod_base = OTHER; note = adenosine-3'-phosphate
  modified_base 11: mod_base = OTHER; note = adenosine-3'-phosphate
  modified_base 12: mod_base = OTHER; note = 2'-deoxy-2'-fluorocytidine-3'-phosphate
  modified_base 13: mod_base = OTHER; note = 2'-deoxy-2'-fluorouridine-3'-phosphate
  modified_base 14: mod_base = OTHER; note = 2'-deoxy-2'-fluorocytidine-3'-phosphate
  modified_base 15: mod_base = OTHER; note = 2'-deoxy-2'-fluorocytidine-3'-phosphate
  modified_base 16: mod_base = OTHER; note = adenosine-3'-phosphate
  modified_base 17: mod_base = OTHER; note = guanosine-3'-phosphate
  modified_base 18: mod_base = OTHER; note = guanosine-3'-phosphate
  modified_base 19: mod_base = OTHER; note = 2'-deoxy-2'-fluorocytidine-3'-phosphate
  modified_base 20: mod_base = OTHER; note = 2'-deoxythymidine-3'-phosphorothioate
  misc_feature 1..19: note = RNA
  misc_feature 20..21: note = DNA
ttccgaataaactccaggctt

SEQ ID NO: 1447 - DNA, 21 bp, synthetic construct
  source 1..21: mol_type = other DNA
  modified_base 1: mod_base = OTHER; note = guanosine-3'-phosphate
  modified_base 2: mod_base = OTHER; note = 2'-deoxy-2'-fluorocytidine-3'-phosphate
  modified_base 3: mod_base = OTHER; note = 2'-deoxy-2'-fluorocytidine-3'-phosphate
  modified_base 4: mod_base = OTHER; note = 2'-deoxy-2'-fluorouridine-3'-phosphate
  modified_base 5: mod_base = OTHER; note = guanosine-3'-phosphate
  modified_base 6: mod_base = OTHER; note = guanosine-3'-phosphate
  modified_base 7: mod_base = OTHER; note = adenosine-3'-phosphate
  modified_base 8: mod_base = OTHER; note = guanosine-3'-phosphate
  modified_base 9: mod_base = OTHER; note = 2'-deoxy-2'-fluorouridine-3'-phosphate
  modified_base 10: mod_base = OTHER; note = 2'-deoxy-2'-fluorouridine-3'-phosphate
  modified_base 11: mod_base = OTHER; note = 2'-deoxy-2'-fluorouridine-3'-phosphate
  modified_base 12: mod_base = OTHER; note = adenosine-3'-phosphate
  modified_base 13: mod_base = OTHER; note = 2'-deoxy-2'-fluorouridine-3'-phosphate
  modified_base 14: mod_base = OTHER; note = 2'-deoxy-2'-fluorouridine-3'-phosphate
  modified_base 15: mod_base = OTHER; note = 2'-deoxy-2'-fluorocytidine-3'-phosphate
  modified_base 16: mod_base = OTHER; note = guanosine-3'-phosphate
  modified_base 17: mod_base = OTHER; note = guanosine-3'-phosphate
  modified_base 18: mod_base = OTHER; note = adenosine-3'-phosphate
  modified_base 19: mod_base = OTHER; note = adenosine-3'-phosphate
  modified_base 20: mod_base = OTHER; note = 2'-deoxythymidine-3'-phosphorothioate
  misc_feature 1..19: note = RNA
  misc_feature 20..21: note = DNA
gcctggagtttattcggaatt

SEQ ID NO: 1448 - DNA, 21 bp, synthetic construct
  source 1..21: mol_type = other DNA
  modified_base 1: mod_base = OTHER; note = uridine-3'-phosphate
  modified_base 2: mod_base = OTHER; note = uridine-3'-phosphate
  modified_base 3: mod_base = OTHER; note = cytidine-3'-phosphate
  modified_base 4: mod_base = OTHER; note = cytidine-3'-phosphate
  modified_base 5: mod_base = OTHER; note = guanosine-3'-phosphate
  modified_base 6: mod_base = OTHER; note = adenosine-3'-phosphate
  modified_base 7: mod_base = OTHER; note = adenosine-3'-phosphate
  modified_base 8: mod_base = OTHER; note = uridine-3'-phosphate
  modified_base 9: mod_base = OTHER; note = adenosine-3'-phosphate
  modified_base 10: mod_base = OTHER; note = adenosine-3'-phosphate
  modified_base 11: mod_base = OTHER; note = adenosine-3'-phosphate
  modified_base 12: mod_base = OTHER; note = cytidine-3'-phosphate
  modified_base 13: mod_base = OTHER; note = uridine-3'-phosphate
  modified_base 14: mod_base = OTHER; note = cytidine-3'-phosphate
  modified_base 15: mod_base = OTHER; note = cytidine-3'-phosphate
  modified_base 16: mod_base = OTHER; note = adenosine-3'-phosphate
  modified_base 17: mod_base = OTHER; note = guanosine-3'-phosphate
  modified_base 18: mod_base = OTHER; note = guanosine-3'-phosphate
  modified_base 19: mod_base = OTHER; note = cytidine-3'-phosphate
  modified_base 20: mod_base = OTHER; note = 2'-deoxythymidine-3'-phosphorothioate
  misc_feature 1..19: note = RNA
  misc_feature 20..21: note = DNA
ttccgaataaactccaggctt

SEQ ID NO: 1449 - DNA, 21 bp, synthetic construct
  source 1..21: mol_type = other DNA
  modified_base 1: mod_base = OTHER; note = guanosine-3'-phosphate
  modified_base 2: mod_base = OTHER; note = 2'-deoxy-2'-fluorocytidine-3'-phosphate
  modified_base 3: mod_base = OTHER; note = 2'-deoxy-2'-fluorocytidine-3'-phosphate
  modified_base 4: mod_base = OTHER; note = 2'-deoxy-2'-fluorouridine-3'-phosphate
  modified_base 5: mod_base = OTHER; note = guanosine-3'-phosphate
  modified_base 6: mod_base = OTHER; note = guanosine-3'-phosphate
  modified_base 7: mod_base = OTHER; note = adenosine-3'-phosphate
  modified_base 8: mod_base = OTHER; note = guanosine-3'-phosphate
  modified_base 9: mod_base = OTHER; note = 2'-deoxy-2'-fluorouridine-3'-phosphate
  modified_base 10: mod_base = OTHER; note = 2'-deoxy-2'-fluorouridine-3'-phosphate
  modified_base 11: mod_base = OTHER; note = 2'-deoxy-2'-fluorouridine-3'-phosphate
  modified_base 12: mod_base = OTHER; note = adenosine-3'-phosphate
  modified_base 13: mod_base = OTHER; note = 2'-deoxy-2'-fluorouridine-3'-phosphate
  modified_base 14: mod_base = OTHER; note = 2'-deoxy-2'-fluorouridine-3'-phosphate
  modified_base 15: mod_base = OTHER; note = 2'-deoxy-2'-fluorocytidine-3'-phosphate
  modified_base 16: mod_base = OTHER; note = guanosine-3'-phosphate
  modified_base 17: mod_base = OTHER; note = guanosine-3'-phosphate
  modified_base 18: mod_base = OTHER; note = adenosine-3'-phosphate
  modified_base 19: mod_base = OTHER; note = adenosine-3'-phosphate
  modified_base 20: mod_base = OTHER; note = 2'-deoxythymidine-3'-phosphorothioate
  misc_feature 1..19: note = RNA
  misc_feature 20..21: note = DNA
gcctggagtttattcggaatt

SEQ ID NO: 1450 - DNA, 21 bp, synthetic construct
  source 1..21: mol_type = other DNA
  modified_base 1: mod_base = OTHER; note = 2'-O-methyluridine-3'-phosphate
  modified_base 2: mod_base = OTHER; note = uridine-3'-phosphate
  modified_base 3: mod_base = OTHER; note = 2'-O-methylcytidine-3'-phosphate
  modified_base 4: mod_base = OTHER; note = cytidine-3'-phosphate
  modified_base 5: mod_base = OTHER; note = guanosine-3'-phosphate
  modified_base 6: mod_base = OTHER; note = adenosine-3'-phosphate
  modified_base 7: mod_base = OTHER; note = adenosine-3'-phosphate
  modified_base 8: mod_base = OTHER; note = 2'-O-methyluridine-3'-phosphate
  modified_base 9: mod_base = OTHER; note = adenosine-3'-phosphate
  modified_base 10: mod_base = OTHER; note = adenosine-3'-phosphate
  modified_base 11: mod_base = OTHER; note = adenosine-3'-phosphate
  modified_base 12: mod_base = OTHER; note = cytidine-3'-phosphate
  modified_base 13: mod_base = OTHER; note = uridine-3'-phosphate
  modified_base 14: mod_base = OTHER; note = 2'-O-methylcytidine-3'-phosphate
  modified_base 15: mod_base = OTHER; note = 2'-O-methylcytidine-3'-phosphate
  modified_base 16: mod_base = OTHER; note = adenosine-3'-phosphate
  modified_base 17: mod_base = OTHER; note = guanosine-3'-phosphate
  modified_base 18: mod_base = OTHER; note = guanosine-3'-phosphate
  modified_base 19: mod_base = OTHER; note = cytidine-3'-phosphate
  modified_base 20: mod_base = OTHER; note = 2'-deoxythymidine-3'-phosphorothioate
  misc_feature 1..19: note = RNA
  misc_feature 20..21: note = DNA
ttccgaataaactccaggctt

SEQ ID NO: 1451 - DNA, 21 bp, synthetic construct
  source 1..21: mol_type = other DNA
  modified_base 1: mod_base = OTHER; note = guanosine-3'-phosphate
  modified_base 2: mod_base = OTHER; note = 2'-deoxy-2'-fluorocytidine-3'-phosphate
  modified_base 3: mod_base = OTHER; note = 2'-deoxy-2'-fluorocytidine-3'-phosphate
  modified_base 4: mod_base = OTHER; note = 2'-deoxy-2'-fluorouridine-3'-phosphate
  modified_base 5: mod_base = OTHER; note = guanosine-3'-phosphate
  modified_base 6: mod_base = OTHER; note = guanosine-3'-phosphate
  modified_base 7: mod_base = OTHER; note = adenosine-3'-phosphate
  modified_base 8: mod_base = OTHER; note = guanosine-3'-phosphate
  modified_base 9: mod_base = OTHER; note = 2'-deoxy-2'-fluorouridine-3'-phosphate
  modified_base 10: mod_base = OTHER; note = 2'-deoxy-2'-fluorouridine-3'-phosphate
  modified_base 11: mod_base = OTHER; note = 2'-deoxy-2'-fluorouridine-3'-phosphate
  modified_base 12: mod_base = OTHER; note = adenosine-3'-phosphate
  modified_base 13: mod_base = OTHER; note = 2'-deoxy-2'-fluorouridine-3'-phosphate
  modified_base 14: mod_base = OTHER; note = 2'-deoxy-2'-fluorouridine-3'-phosphate
  modified_base 15: mod_base = OTHER; note = 2'-deoxy-2'-fluorocytidine-3'-phosphate
  modified_base 16: mod_base = OTHER; note = guanosine-3'-phosphate
  modified_base 17: mod_base = OTHER; note = guanosine-3'-phosphate
  modified_base 18: mod_base = OTHER; note = adenosine-3'-phosphate
  modified_base 19: mod_base = OTHER; note = adenosine-3'-phosphate
  modified_base 20: mod_base = OTHER; note = 2'-deoxythymidine-3'-phosphorothioate
  misc_feature 1..19: note = RNA
  misc_feature 20..21: note = DNA
gcctggagtttattcggaatt

SEQ ID NO: 1452 - RNA, 21 nt, synthetic construct
  source 1..21: mol_type = other RNA
  modified_base 6: mod_base = OTHER; note = 2'-O-methyladenosine-3'-phosphate
  modified_base 7: mod_base = OTHER; note = 2'-O-methyladenosine-3'-phosphate
  modified_base 10: mod_base = OTHER; note = 2'-O-methyladenosine-3'-phosphate
  modified_base 11: mod_base = OTHER; note = 2'-O-methyladenosine-3'-phosphate
  modified_base 17: mod_base = OTHER; note = 2'-O-methylguanosine-3'-phosphate
  modified_base 18: mod_base = OTHER; note = 2'-O-methylguanosine-3'-phosphate
  modified_base 19: mod_base = OTHER; note = 2'-O-methylcytidine-3'-phosphorothioate
  modified_base 20: mod_base = OTHER; note = 2'-O-methylcytidine-3'-phosphorothioate
  modified_base 21: mod_base = OTHER; note = 2'-O-methyluridine
ttccgaataaactccaggcct

SEQ ID NO: 1453 - DNA, 21 bp, synthetic construct
  source 1..21: mol_type = other DNA
  modified_base 1: mod_base = OTHER; note = guanosine-3'-phosphate
  modified_base 2: mod_base = OTHER; note = 2'-deoxy-2'-fluorocytidine-3'-phosphate
  modified_base 3: mod_base = OTHER; note = 2'-deoxy-2'-fluorocytidine-3'-phosphate
  modified_base 4: mod_base = OTHER; note = 2'-deoxy-2'-fluorouridine-3'-phosphate
  modified_base 5: mod_base = OTHER; note = guanosine-3'-phosphate
  modified_base 6: mod_base = OTHER; note = guanosine-3'-phosphate
  modified_base 7: mod_base = OTHER; note = adenosine-3'-phosphate
  modified_base 8: mod_base = OTHER; note = guanosine-3'-phosphate
  modified_base 9: mod_base = OTHER; note = 2'-deoxy-2'-fluorouridine-3'-phosphate
  modified_base 10: mod_base = OTHER; note = 2'-deoxy-2'-fluorouridine-3'-phosphate
  modified_base 11: mod_base = OTHER; note = 2'-deoxy-2'-fluorouridine-3'-phosphate
  modified_base 12: mod_base = OTHER; note = adenosine-3'-phosphate
  modified_base 13: mod_base = OTHER; note = 2'-deoxy-2'-fluorouridine-3'-phosphate
  modified_base 14: mod_base = OTHER; note = 2'-deoxy-2'-fluorouridine-3'-phosphate
  modified_base 15: mod_base = OTHER; note = 2'-deoxy-2'-fluorocytidine-3'-phosphate
  modified_base 16: mod_base = OTHER; note = guanosine-3'-phosphate
  modified_base 17: mod_base = OTHER; note = guanosine-3'-phosphate
  modified_base 18: mod_base = OTHER; note = adenosine-3'-phosphate
  modified_base 19: mod_base = OTHER; note = adenosine-3'-phosphate
  modified_base 20: mod_base = OTHER; note = 2'-deoxythymidine-3'-phosphorothioate
  misc_feature 1..19: note = RNA
  misc_feature 20..21: note = DNA
gcctggagtttattcggaatt

SEQ ID NO: 1454 - RNA, 21 nt, synthetic construct
  source 1..21: mol_type = other RNA
  modified_base 19: mod_base = OTHER; note = cytidine-3'-phosphorothioate
  modified_base 20: mod_base = OTHER; note = 2'-O-methylcytidine-3'-phosphorothioate
  modified_base 21: mod_base = OTHER; note = 2'-O-methyluridine
ttccgaataaactccaggcct

SEQ ID NO: 1455 - DNA, 21 bp, synthetic construct
  source 1..21: mol_type = other DNA
  modified_base 1: mod_base = OTHER; note = guanosine-3'-phosphate
  modified_base 2: mod_base = OTHER; note = 2'-deoxy-2'-fluorocytidine-3'-phosphate
  modified_base 3: mod_base = OTHER; note = 2'-deoxy-2'-fluorocytidine-3'-phosphate
  modified_base 4: mod_base = OTHER; note = 2'-deoxy-2'-fluorouridine-3'-phosphate
  modified_base 5: mod_base = OTHER; note = guanosine-3'-phosphate
  modified_base 6: mod_base = OTHER; note = guanosine-3'-phosphate
  modified_base 7: mod_base = OTHER; note = adenosine-3'-phosphate
  modified_base 8: mod_base = OTHER; note = guanosine-3'-phosphate
  modified_base 9: mod_base = OTHER; note = 2'-deoxy-2'-fluorouridine-3'-phosphate
  modified_base 10: mod_base = OTHER; note = 2'-deoxy-2'-fluorouridine-3'-phosphate
  modified_base 11: mod_base = OTHER; note = 2'-deoxy-2'-fluorouridine-3'-phosphate
  modified_base 12: mod_base = OTHER; note = adenosine-3'-phosphate
  modified_base 13: mod_base = OTHER; note = 2'-deoxy-2'-fluorouridine-3'-phosphate
  modified_base 14: mod_base = OTHER; note = 2'-deoxy-2'-fluorouridine-3'-phosphate
  modified_base 15: mod_base = OTHER; note = 2'-deoxy-2'-fluorocytidine-3'-phosphate
  modified_base 16: mod_base = OTHER; note = guanosine-3'-phosphate
  modified_base 17: mod_base = OTHER; note = guanosine-3'-phosphate
  modified_base 18: mod_base = OTHER; note = adenosine-3'-phosphate
  modified_base 19: mod_base = OTHER; note = adenosine-3'-phosphate
  modified_base 20: mod_base = OTHER; note = 2'-deoxythymidine-3'-phosphorothioate
  misc_feature 1..19: note = RNA
  misc_feature 20..21: note = DNA
gcctggagtttattcggaatt

SEQ ID NO: 1456 - RNA, 21 nt, synthetic construct
  source 1..21: mol_type = other RNA
  modified_base 1: mod_base = OTHER; note = 2'-O-methyluridine-3'-phosphate 5'phosphate
  modified_base 2: mod_base = OTHER; note = 2'-deoxy-2'-fluorouridine-3'-phosphate
  modified_base 3: mod_base = OTHER; note = 2'-O-methylcytidine-3'-phosphate
  modified_base 4: mod_base = OTHER; note = 2'-deoxy-2'-fluorocytidine-3'-phosphate
  modified_base 5: mod_base = OTHER; note = 2'-O-methylguanosine-3'-phosphate
  modified_base 6: mod_base = OTHER; note = 2'-deoxy-2'-fluoroadenosine-3'-phosphate
  modified_base 7: mod_base = OTHER; note = 2'-O-methyladenosine-3'-phosphate
  modified_base 8: mod_base = OTHER; note = 2'-deoxy-2'-fluorouridine-3'-phosphate
  modified_base 9: mod_base = OTHER; note = 2'-O-methyladenosine-3'-phosphate
  modified_base 10: mod_base = OTHER; note = 2'-deoxy-2'-fluoroadenosine-3'-phosphate
  modified_base 11: mod_base = OTHER; note = 2'-O-methyladenosine-3'-phosphate
  modified_base 12: mod_base = OTHER; note = 2'-deoxy-2'-fluorocytidine-3'-phosphate
  modified_base 13: mod_base = OTHER; note = 2'-O-methyluridine-3'-phosphate
  modified_base 14: mod_base = OTHER; note = 2'-deoxy-2'-fluorocytidine-3'-phosphate
  modified_base 15: mod_base = OTHER; note = 2'-O-methylcytidine-3'-phosphate
  modified_base 16: mod_base = OTHER; note = 2'-deoxy-2'-fluoroadenosine-3'-phosphate
  modified_base 17: mod_base = OTHER; note = 2'-O-methylguanosine-3'-phosphate
  modified_base 18: mod_base = OTHER; note = 2'-deoxy-2'-fluoroguanosine-3'-phosphate
  modified_base 19: mod_base = OTHER; note = 2'-O-methylcytidine-3'-phosphorothioate
  modified_base 20: mod_base = OTHER; note = 2'-deoxy-2'-fluorocytidine-3'-phosphorothioate
  modified_base 21: mod_base = OTHER; note = 2'-O-methyluridine
ttccgaataaactccaggcct

SEQ ID NO: 1457 - DNA, 21 bp, synthetic construct
  source 1..21: mol_type = other DNA
  modified_base 1: mod_base = OTHER; note = guanosine-3'-phosphate
  modified_base 2: mod_base = OTHER; note = 2'-deoxy-2'-fluorocytidine-3'-phosphate
  modified_base 3: mod_base = OTHER; note = 2'-deoxy-2'-fluorocytidine-3'-phosphate
  modified_base 4: mod_base = OTHER; note = 2'-deoxy-2'-fluorouridine-3'-phosphate
  modified_base 5: mod_base = OTHER; note = guanosine-3'-phosphate
  modified_base 6: mod_base = OTHER; note = guanosine-3'-phosphate
  modified_base 7: mod_base = OTHER; note = adenosine-3'-phosphate
  modified_base 8: mod_base = OTHER; note = guanosine-3'-phosphate
  modified_base 9: mod_base = OTHER; note = 2'-deoxy-2'-fluorouridine-3'-phosphate
  modified_base 10: mod_base = OTHER; note = 2'-deoxy-2'-fluorouridine-3'-phosphate
  modified_base 11: mod_base = OTHER; note = 2'-deoxy-2'-fluorouridine-3'-phosphate
  modified_base 12: mod_base = OTHER; note = adenosine-3'-phosphate
  modified_base 13: mod_base = OTHER; note = 2'-deoxy-2'-fluorouridine-3'-phosphate
  modified_base 14: mod_base = OTHER; note = 2'-deoxy-2'-fluorouridine-3'-phosphate
  modified_base 15: mod_base = OTHER; note = 2'-deoxy-2'-fluorocytidine-3'-phosphate
  modified_base 16: mod_base = OTHER; note = guanosine-3'-phosphate
  modified_base 17: mod_base = OTHER; note = guanosine-3'-phosphate
  modified_base 18: mod_base = OTHER; note = adenosine-3'-phosphate
  modified_base 19: mod_base = OTHER; note = adenosine-3'-phosphate
  modified_base 20: mod_base = OTHER; note = 2'-deoxythymidine-3'-phosphorothioate
  misc_feature 1..19: note = RNA
  misc_feature 20..21: note = DNA
gcctggagtttattcggaatt

SEQ ID NO: 1458 - DNA, 21 bp, synthetic construct
  source 1..21: mol_type = other DNA
  modified_base 1: mod_base = OTHER; note = 2'-O-methyluridine-3'-phosphate 5'phosphate
  modified_base 2: mod_base = OTHER; note = 2'-deoxy-2'-fluorouridine-3'-phosphate
  modified_base 3: mod_base = OTHER; note = 2'-O-methylcytidine-3'-phosphate
  modified_base 4: mod_base = OTHER; note = 2'-deoxy-2'-fluorocytidine-3'-phosphate
  modified_base 5: mod_base = OTHER; note = 2'-O-methylguanosine-3'-phosphate
  modified_base 6: mod_base = OTHER; note = 2'-deoxy-2'-fluoroadenosine-3'-phosphate
  modified_base 7: mod_base = OTHER; note = 2'-O-methyladenosine-3'-phosphate
  modified_base 8: mod_base = OTHER; note = 2'-deoxy-2'-fluorouridine-3'-phosphate
  modified_base 9: mod_base = OTHER; note = 2'-O-methyladenosine-3'-phosphate
  modified_base 10: mod_base = OTHER; note = 2'-deoxy-2'-fluoroadenosine-3'-phosphate
  modified_base 11: mod_base = OTHER; note = 2'-O-methyladenosine-3'-phosphate
  modified_base 12: mod_base = OTHER; note = 2'-deoxy-2'-fluorocytidine-3'-phosphate
  modified_base 13: mod_base = OTHER; note = 2'-O-methyluridine-3'-phosphate
  modified_base 14: mod_base = OTHER; note = 2'-deoxy-2'-fluorocytidine-3'-phosphate
  modified_base 15: mod_base = OTHER; note = 2'-O-methylcytidine-3'-phosphate
  modified_base 16: mod_base = OTHER; note = 2'-deoxy-2'-fluoroadenosine-3'-phosphate
  modified_base 17: mod_base = OTHER; note = 2'-O-methylguanosine-3'-phosphate
  modified_base 18: mod_base = OTHER; note = 2'-deoxy-2'-fluoroguanosine-3'-phosphate
  modified_base 19: mod_base = OTHER; note = 2'-O-methylcytidine-3'-phosphate
  modified_base 20: mod_base = OTHER; note = 2'-deoxythymidine-3'-phosphorothioate
  misc_feature 1..19: note = RNA
  misc_feature 20..21: note = DNA
ttccgaataaactccaggctt

SEQ ID NO: 1459 - DNA, 21 bp, synthetic construct
  source 1..21: mol_type = other DNA
  modified_base 1: mod_base = OTHER; note = guanosine-3'-phosphate
  modified_base 2: mod_base = OTHER; note = 2'-deoxy-2'-fluorocytidine-3'-phosphate
  modified_base 3: mod_base = OTHER; note = 2'-deoxy-2'-fluorocytidine-3'-phosphate
  modified_base 4: mod_base = OTHER; note = 2'-deoxy-2'-fluorouridine-3'-phosphate
  modified_base 5: mod_base = OTHER; note = guanosine-3'-phosphate
  modified_base 6: mod_base = OTHER; note = guanosine-3'-phosphate
  modified_base 7: mod_base = OTHER; note = adenosine-3'-phosphate
  modified_base 8: mod_base = OTHER; note = guanosine-3'-phosphate
  modified_base 9: mod_base = OTHER; note = 2'-deoxy-2'-fluorouridine-3'-phosphate
  modified_base 10: mod_base = OTHER; note = 2'-deoxy-2'-fluorouridine-3'-phosphate
  modified_base 11: mod_base = OTHER; note = 2'-deoxy-2'-fluorouridine-3'-phosphate
  modified_base 12: mod_base = OTHER; note = adenosine-3'-phosphate
  modified_base 13: mod_base = OTHER; note = 2'-deoxy-2'-fluorouridine-3'-phosphate
  modified_base 14: mod_base = OTHER; note = 2'-deoxy-2'-fluorouridine-3'-phosphate
  modified_base 15: mod_base = OTHER; note = 2'-deoxy-2'-fluorocytidine-3'-phosphate
  modified_base 16: mod_base = OTHER; note = guanosine-3'-phosphate
  modified_base 17: mod_base = OTHER; note = guanosine-3'-phosphate
  modified_base 18: mod_base = OTHER; note = adenosine-3'-phosphate
  modified_base 19: mod_base = OTHER; note = adenosine-3'-phosphate
  modified_base 20: mod_base = OTHER; note = 2'-deoxythymidine-3'-phosphorothioate
  misc_feature 1..19: note = RNA
  misc_feature 20..21: note = DNA
gcctggagtttattcggaatt

SEQ ID NO: 1460 - DNA, 21 bp, synthetic construct
  source 1..21: mol_type = other DNA
  modified_base 1: mod_base = OTHER; note = 2'-deoxy-2'-fluorouridine-3'-phosphate 5'phosphate
  modified_base 2: mod_base = OTHER; note = 2'-deoxy-2'-fluorouridine-3'-phosphate
  modified_base 3: mod_base = OTHER; note = 2'-deoxy-2'-fluorocytidine-3'-phosphate
  modified_base 4: mod_base = OTHER; note = 2'-deoxy-2'-fluorocytidine-3'-phosphate
  modified_base 5: mod_base = OTHER; note = guanosine-3'-phosphate
  modified_base 6: mod_base = OTHER; note = adenosine-3'-phosphate
  modified_base 7: mod_base = OTHER; note = adenosine-3'-phosphate
  modified_base 8: mod_base = OTHER; note = 2'-deoxy-2'-fluorouridine-3'-phosphate
  modified_base 9: mod_base = OTHER; note = adenosine-3'-phosphate
  modified_base 10: mod_base = OTHER; note = adenosine-3'-phosphate
  modified_base 11: mod_base = OTHER; note = adenosine-3'-phosphate
  modified_base 12: mod_base = OTHER; note = 2'-deoxy-2'-fluorocytidine-3'-phosphate
  modified_base 13: mod_base = OTHER; note = 2'-deoxy-2'-fluorouridine-3'-phosphate
  modified_base 14: mod_base = OTHER; note = 2'-deoxy-2'-fluorocytidine-3'-phosphate
  modified_base 15: mod_base = OTHER; note = 2'-deoxy-2'-fluorocytidine-3'-phosphate
  modified_base 16: mod_base = OTHER; note = adenosine-3'-phosphate
  modified_base 17: mod_base = OTHER; note = guanosine-3'-phosphate
  modified_base 18: mod_base = OTHER; note = guanosine-3'-phosphate
  modified_base 19: mod_base = OTHER; note = 2'-deoxy-2'-fluorocytidine-3'-phosphate
  modified_base 20: mod_base = OTHER; note = 2'-deoxythymidine-3'-phosphorothioate
  misc_feature 1..19: note = RNA
  misc_feature 20..21: note = DNA
ttccgaataaactccaggctt

SEQ ID NO: 1461 - DNA, 21 bp, synthetic construct
  source 1..21: mol_type = other DNA
  modified_base 1: mod_base = OTHER; note = guanosine-3'-phosphate
  modified_base 2: mod_base = OTHER; note = cytidine-3'-phosphate
  modified_base 3: mod_base = OTHER; note = cytidine-3'-phosphate
  modified_base 4: mod_base = OTHER; note = uridine-3'-phosphate
  modified_base 5: mod_base = OTHER; note = guanosine-3'-phosphate
  modified_base 6: mod_base = OTHER; note = guanosine-3'-phosphate
  modified_base 7: mod_base = OTHER; note = adenosine-3'-phosphate
  modified_base 8: mod_base = OTHER; note = guanosine-3'-phosphate
  modified_base 9: mod_base = OTHER; note = uridine-3'-phosphate
  modified_base 10: mod_base = OTHER; note = uridine-3'-phosphate
  modified_base 11: mod_base = OTHER; note = uridine-3'-phosphate
  modified_base 12: mod_base = OTHER; note = adenosine-3'-phosphate
  modified_base 13: mod_base = OTHER; note = uridine-3'-phosphate
  modified_base 14: mod_base = OTHER; note = uridine-3'-phosphate
  modified_base 15: mod_base = OTHER; note = cytidine-3'-phosphate
  modified_base 16: mod_base = OTHER; note = guanosine-3'-phosphate
  modified_base 17: mod_base = OTHER; note = guanosine-3'-phosphate
  modified_base 18: mod_base = OTHER; note = adenosine-3'-phosphate
  modified_base 19: mod_base = OTHER; note = adenosine-3'-phosphate
  modified_base 20: mod_base = OTHER; note = 2'-deoxythymidine-3'-phosphorothioate
  misc_feature 1..19: note = RNA
  misc_feature 20..21: note = DNA
gcctggagtttattcggaatt

SEQ ID NO: 1462 - DNA, 21 bp, synthetic construct
  source 1..21: mol_type = other DNA
  modified_base 1: mod_base = OTHER; note = 2'-deoxy-2'-fluorouridine-3'-phosphate 5'phosphate
  modified_base 2: mod_base = OTHER; note = 2'-deoxy-2'-fluorouridine-3'-phosphate
  modified_base 3: mod_base = OTHER; note = 2'-deoxy-2'-fluorocytidine-3'-phosphate
  modified_base 4: mod_base = OTHER; note = 2'-deoxy-2'-fluorocytidine-3'-phosphate
  modified_base 5: mod_base = OTHER; note = guanosine-3'-phosphate
  modified_base 6: mod_base = OTHER; note = adenosine-3'-phosphate
  modified_base 7: mod_base = OTHER; note = adenosine-3'-phosphate
  modified_base 8: mod_base = OTHER; note = 2'-deoxy-2'-fluorouridine-3'-phosphate
  modified_base 9: mod_base = OTHER; note = adenosine-3'-phosphate
  modified_base 10: mod_base = OTHER; note = adenosine-3'-phosphate
  modified_base 11: mod_base = OTHER; note = adenosine-3'-phosphate
  modified_base 12: mod_base = OTHER; note = 2'-deoxy-2'-fluorocytidine-3'-phosphate
  modified_base 13: mod_base = OTHER; note = 2'-deoxy-2'-fluorouridine-3'-phosphate
  modified_base 14: mod_base = OTHER; note = 2'-deoxy-2'-fluorocytidine-3'-phosphate
  modified_base 15: mod_base = OTHER; note = 2'-deoxy-2'-fluorocytidine-3'-phosphate
  modified_base 16: mod_base = OTHER; note = adenosine-3'-phosphate
  modified_base 17: mod_base = OTHER; note = guanosine-3'-phosphate
  modified_base 18: mod_base = OTHER; note = guanosine-3'-phosphate
  modified_base 19: mod_base = OTHER; note = 2'-deoxy-2'-fluorocytidine-3'-phosphate
  modified_base 20: mod_base = OTHER; note = 2'-deoxythymidine-3'-phosphorothioate
  misc_feature 1..19: note = RNA
  misc_feature 20..21: note = DNA
ttccgaataaactccaggctt

SEQ ID NO: 1463 - DNA, 21 bp, synthetic construct
  source 1..21: mol_type = other DNA
  modified_base 1: mod_base = OTHER; note = guanosine-3'-phosphate
  modified_base 2: mod_base = OTHER; note = 2'-O-methylcytidine-3'-phosphate
  modified_base 3: mod_base = OTHER; note = 2'-O-methylcytidine-3'-phosphate
  modified_base 4: mod_base = OTHER; note = 2'-O-methyluridine-3'-phosphate
  modified_base 5: mod_base = OTHER; note = guanosine-3'-phosphate
  modified_base 6: mod_base = OTHER; note = guanosine-3'-phosphate
  modified_base 7: mod_base = OTHER; note = adenosine-3'-phosphate
  modified_base 8: mod_base = OTHER; note = guanosine-3'-phosphate
  modified_base 9: mod_base = OTHER; note = 2'-O-methyluridine-3'-phosphate
  modified_base 10: mod_base = OTHER; note = 2'-O-methyluridine-3'-phosphate
  modified_base 11: mod_base = OTHER; note = 2'-O-methyluridine-3'-phosphate
  modified_base 12: mod_base = OTHER; note = adenosine-3'-phosphate
  modified_base 13: mod_base = OTHER; note = 2'-O-methyluridine-3'-phosphate
  modified_base 14: mod_base = OTHER; note = 2'-O-methyluridine-3'-phosphate
  modified_base 15: mod_base = OTHER; note = 2'-O-methylcytidine-3'-phosphate
  modified_base 16: mod_base = OTHER; note = guanosine-3'-phosphate
  modified_base 17: mod_base = OTHER; note = guanosine-3'-phosphate
  modified_base 18: mod_base = OTHER; note = adenosine-3'-phosphate
  modified_base 19: mod_base = OTHER; note = adenosine-3'-phosphate
  modified_base 20: mod_base = OTHER; note = 2'-deoxythymidine-3'-phosphorothioate
  misc_feature 1..19: note = RNA
  misc_feature 20..21: note = DNA
gcctggagtttattcggaatt

SEQ ID NO: 1464 - DNA, 21 bp, synthetic construct
  source 1..21: mol_type = other DNA
  modified_base 1: mod_base = OTHER; note = 2'-deoxy-2'-fluorouridine-3'-phosphate 5'phosphate
  modified_base 2: mod_base = OTHER; note = 2'-deoxy-2'-fluorouridine-3'-phosphate
  modified_base 3: mod_base = OTHER; note = 2'-deoxy-2'-fluorocytidine-3'-phosphate
  modified_base 4: mod_base = OTHER; note = 2'-deoxy-2'-fluorocytidine-3'-phosphate
  modified_base 5: mod_base = OTHER; note = guanosine-3'-phosphate
  modified_base 6: mod_base = OTHER; note = adenosine-3'-phosphate
  modified_base 7: mod_base = OTHER; note = adenosine-3'-phosphate
  modified_base 8: mod_base = OTHER; note = 2'-deoxy-2'-fluorouridine-3'-phosphate
  modified_base 9: mod_base = OTHER; note = adenosine-3'-phosphate
  modified_base 10: mod_base = OTHER; note = adenosine-3'-phosphate
  modified_base 11: mod_base = OTHER; note = adenosine-3'-phosphate
  modified_base 12: mod_base = OTHER; note = 2'-deoxy-2'-fluorocytidine-3'-phosphate
  modified_base 13: mod_base = OTHER; note = 2'-deoxy-2'-fluorouridine-3'-phosphate
  modified_base 14: mod_base = OTHER; note = 2'-deoxy-2'-fluorocytidine-3'-phosphate
  modified_base 15: mod_base = OTHER; note = 2'-deoxy-2'-fluorocytidine-3'-phosphate
  modified_base 16: mod_base = OTHER; note = adenosine-3'-phosphate
  modified_base 17: mod_base = OTHER; note = guanosine-3'-phosphate
  modified_base 18: mod_base = OTHER; note = guanosine-3'-phosphate
  modified_base 19: mod_base = OTHER; note = 2'-deoxy-2'-fluorocytidine-3'-phosphate
  modified_base 20: mod_base = OTHER; note = 2'-deoxythymidine-3'-phosphorothioate
  misc_feature 1..19: note = RNA
  misc_feature 20..21: note = DNA
ttccgaataaactccaggctt

SEQ ID NO: 1465 - DNA, 21 bp, synthetic construct
  source 1..21: mol_type = other DNA
  modified_base 1: mod_base = OTHER; note = guanosine-3'-phosphate
  modified_base 2: mod_base = OTHER; note = 2'-O-methylcytidine-3'-phosphate
  modified_base 3: mod_base = OTHER; note = cytidine-3'-phosphate
  modified_base 4: mod_base = OTHER; note = 2'-O-methyluridine-3'-phosphate
  modified_base 5: mod_base = OTHER; note = guanosine-3'-phosphate
  modified_base 6: mod_base = OTHER; note = 2'-O-methylguanosine-3'-phosphate
  modified_base 7: mod_base = OTHER; note = adenosine-3'-phosphate
  modified_base 8: mod_base = OTHER; note = 2'-O-methylguanosine-3'-phosphate
  modified_base 9: mod_base = OTHER; note = uridine-3'-phosphate
  modified_base 10: mod_base = OTHER; note = 2'-O-methyluridine-3'-phosphate
  modified_base 11: mod_base = OTHER; note = uridine-3'-phosphate
  modified_base 12: mod_base = OTHER; note = 2'-O-methyladenosine-3'-phosphate
  modified_base 13: mod_base = OTHER; note = uridine-3'-phosphate
  modified_base 14: mod_base = OTHER; note = 2'-O-methyluridine-3'-phosphate
  modified_base 15: mod_base = OTHER; note = cytidine-3'-phosphate
  modified_base 16: mod_base = OTHER; note = 2'-O-methylguanosine-3'-phosphate
  modified_base 17: mod_base = OTHER; note = guanosine-3'-phosphate
  modified_base 18: mod_base = OTHER; note = 2'-O-methyladenosine-3'-phosphate
  modified_base 19: mod_base = OTHER; note = adenosine-3'-phosphate
  modified_base 20: mod_base = OTHER; note = 2'-deoxythymidine-3'-phosphorothioate
  misc_feature 1..19: note = RNA
  misc_feature 20..21: note = DNA
gcctggagtttattcggaatt

SEQ ID NO: 1466 - DNA, 21 bp, synthetic construct
  source 1..21: mol_type = other DNA
  modified_base 1: mod_base = OTHER; note = 2'-deoxy-2'-fluorouridine-3'-phosphate 5'phosphate
  modified_base 2: mod_base = OTHER; note = 2'-deoxy-2'-fluorouridine-3'-phosphate
  modified_base 3: mod_base = OTHER; note = 2'-deoxy-2'-fluorocytidine-3'-phosphate
  modified_base 4: mod_base = OTHER; note = 2'-deoxy-2'-fluorocytidine-3'-phosphate
  modified_base 5: mod_base = OTHER; note = guanosine-3'-phosphate
  modified_base 6: mod_base = OTHER; note = adenosine-3'-phosphate
  modified_base 7: mod_base = OTHER; note = adenosine-3'-phosphate
  modified_base 8: mod_base = OTHER; note = 2'-deoxy-2'-fluorouridine-3'-phosphate
  modified_base 9: mod_base = OTHER; note = adenosine-3'-phosphate
  modified_base 10: mod_base = OTHER; note = adenosine-3'-phosphate
  modified_base 11: mod_base = OTHER; note = adenosine-3'-phosphate
  modified_base 12: mod_base = OTHER; note = 2'-deoxy-2'-fluorocytidine-3'-phosphate
  modified_base 13: mod_base = OTHER; note = 2'-deoxy-2'-fluorouridine-3'-phosphate
  modified_base 14: mod_base = OTHER; note = 2'-deoxy-2'-fluorocytidine-3'-phosphate
  modified_base 15: mod_base = OTHER; note = 2'-deoxy-2'-fluorocytidine-3'-phosphate
  modified_base 16: mod_base = OTHER; note = adenosine-3'-phosphate
  modified_base 17: mod_base = OTHER; note = guanosine-3'-phosphate
  modified_base 18: mod_base = OTHER; note = guanosine-3'-phosphate
  modified_base 19: mod_base = OTHER; note = 2'-deoxy-2'-fluorocytidine-3'-phosphate
  modified_base 20: mod_base = OTHER; note = 2'-deoxythymidine-3'-phosphorothioate
  misc_feature 1..19: note = RNA
  misc_feature 20..21: note = DNA
ttccgaataaactccaggctt

SEQ ID NO: 1467 - RNA, 19 nt, synthetic construct
  source 1..19: mol_type = other RNA
  modified_base 1: mod_base = OTHER; note = 2'-deoxy-2'-fluoroguanosine-3'-phosphate
  modified_base 2: mod_base = OTHER; note = 2'-O-methylcytidine-3'-phosphate
  modified_base 3: mod_base = OTHER; note = 2'-deoxy-2'-fluorocytidine-3'-phosphate
  modified_base 4: mod_base = OTHER; note = 2'-O-methyluridine-3'-phosphate
  modified_base 5: mod_base = OTHER; note = 2'-deoxy-2'-fluoroguanosine-3'-phosphate
  modified_base 6: mod_base = OTHER; note = 2'-O-methylguanosine-3'-phosphate
  modified_base 7: mod_base = OTHER; note = 2'-deoxy-2'-fluoroadenosine-3'-phosphate
  modified_base 8: mod_base = OTHER; note = 2'-O-methylguanosine-3'-phosphate
  modified_base 9: mod_base = OTHER; note = 2'-deoxy-2'-fluorouridine-3'-phosphate
  modified_base 10: mod_base = OTHER; note = 2'-O-methyluridine-3'-phosphate
  modified_base 11: mod_base = OTHER; note = 2'-deoxy-2'-fluorouridine-3'-phosphate
  modified_base 12: mod_base = OTHER; note = 2'-O-methyladenosine-3'-phosphate
  modified_base 13: mod_base = OTHER; note = 2'-deoxy-2'-fluorouridine-3'-phosphate
  modified_base 14: mod_base = OTHER; note = 2'-O-methyluridine-3'-phosphate
  modified_base 15: mod_base = OTHER; note = 2'-deoxy-2'-fluorocytidine-3'-phosphate
  modified_base 16: mod_base = OTHER; note = 2'-O-methylguanosine-3'-phosphate
  modified_base 17: mod_base = OTHER; note = 2'-deoxy-2'-fluoroguanosine-3'-phosphate
  modified_base 18: mod_base = OTHER; note = 2'-O-methyladenosine-3'-phosphate
  modified_base 19: mod_base = OTHER; note = 2'-deoxy-2'-fluoroadenosine
gcctggagtttattcggaa

SEQ ID NO: 1468 - DNA, 21 bp, synthetic construct
  source 1..21: mol_type = other DNA
  modified_base 1: mod_base = OTHER; note = 2'-deoxy-2'-fluorouridine-3'-phosphate 5'phosphate
  modified_base 2: mod_base = OTHER; note = 2'-deoxy-2'-fluorouridine-3'-phosphate
  modified_base 3: mod_base = OTHER; note = 2'-deoxy-2'-fluorocytidine-3'-phosphate
  modified_base 4: mod_base = OTHER; note = 2'-deoxy-2'-fluorocytidine-3'-phosphate
  modified_base 5: mod_base = OTHER; note = guanosine-3'-phosphate
  modified_base 6: mod_base = OTHER; note = adenosine-3'-phosphate
  modified_base 7: mod_base = OTHER; note = adenosine-3'-phosphate
  modified_base 8: mod_base = OTHER; note = 2'-deoxy-2'-fluorouridine-3'-phosphate
  modified_base 9: mod_base = OTHER; note = adenosine-3'-phosphate
  modified_base 10: mod_base = OTHER; note = adenosine-3'-phosphate
  modified_base 11: mod_base = OTHER; note = adenosine-3'-phosphate
  modified_base 12: mod_base = OTHER; note = 2'-deoxy-2'-fluorocytidine-3'-phosphate
  modified_base 13: mod_base = OTHER; note = 2'-deoxy-2'-fluorouridine-3'-phosphate
  modified_base 14: mod_base = OTHER; note = 2'-deoxy-2'-fluorocytidine-3'-phosphate
  modified_base 15: mod_base = OTHER; note = 2'-deoxy-2'-fluorocytidine-3'-phosphate
  modified_base 16: mod_base = OTHER; note = adenosine-3'-phosphate
  modified_base 17: mod_base = OTHER; note = guanosine-3'-phosphate
  modified_base 18: mod_base = OTHER; note = guanosine-3'-phosphate
  modified_base 19: mod_base = OTHER; note = 2'-deoxy-2'-fluorocytidine-3'-phosphate
  modified_base 20: mod_base = OTHER; note = 2'-deoxythymidine-3'-phosphorothioate
  misc_feature 1..19: note = RNA
  misc_feature 20..21: note = DNA
ttccgaataaactccaggctt

SEQ ID NO: 1469 - RNA, 20 nt, synthetic construct
  source 1..20: mol_type = other RNA
  modified_base 2: mod_base = OTHER; note = 2'-deoxy-2'-fluorocytidine-3'-phosphate
  modified_base 3: mod_base = OTHER; note = 2'-deoxy-2'-fluorocytidine-3'-phosphate
  modified_base 4: mod_base = OTHER; note = 2'-deoxy-2'-fluorouridine-3'-phosphate
  modified_base 10: mod_base = OTHER; note = 2'-deoxy-2'-fluorouridine-3'-phosphate
  modified_base 11: mod_base = OTHER; note = 2'-deoxy-2'-fluorouridine-3'-phosphate
  modified_base 12: mod_base = OTHER; note = 2'-deoxy-2'-fluorouridine-3'-phosphate
  modified_base 14: mod_base = OTHER; note = 2'-deoxy-2'-fluorouridine-3'-phosphate
  modified_base 15: mod_base = OTHER; note = 2'-deoxy-2'-fluorouridine-3'-phosphate
  modified_base 16: mod_base = OTHER; note = 2'-deoxy-2'-fluorocytidine-3'-phosphate
gcctggaggtttattcggaa

SEQ ID NO: 1470 - RNA, 21 nt, synthetic construct
  source 1..21: mol_type = other RNA
  modified_base 1: mod_base = OTHER; note = 2'-deoxy-2'-fluorouridine-3'-phosphate
  modified_base 2: mod_base = OTHER; note = 2'-deoxy-2'-fluorouridine-3'-phosphate
  modified_base 3: mod_base = OTHER; note = 2'-deoxy-2'-fluorocytidine-3'-phosphate
  modified_base 4: mod_base = OTHER; note = 2'-deoxy-2'-fluorocytidine-3'-phosphate
  modified_base 8: mod_base = OTHER; note = 2'-deoxy-2'-fluorouridine-3'-phosphate
  modified_base 12: mod_base = OTHER; note = 2'-deoxy-2'-fluorocytidine-3'-phosphate
  modified_base 13: mod_base = OTHER; note = 2'-deoxy-2'-fluorouridine-3'-phosphate
  modified_base 14: mod_base = OTHER; note = 2'-deoxy-2'-fluorocytidine-3'-phosphate
  modified_base 15: mod_base = OTHER; note = 2'-deoxy-2'-fluorocytidine-3'-phosphate
  modified_base 19: mod_base = OTHER; note = 2'-deoxy-2'-fluorocytidine-3'-phosphorothioate
  modified_base 20: mod_base = OTHER; note = 2'-deoxy-2'-fluorocytidine-3'-phosphorothioate
  modified_base 21: mod_base = OTHER; note = 2'-deoxy-2'-fluorouridine
ttccgaataaactccaggcct

SEQ ID NO: 1471 - RNA, 20 nt, synthetic construct
  source 1..20: mol_type = other RNA
  modified_base 2: mod_base = OTHER; note = 2'-deoxy-2'-fluorocytidine-3'-phosphate
  modified_base 3: mod_base = OTHER; note = 2'-deoxy-2'-fluorocytidine-3'-phosphate
  modified_base 4: mod_base = OTHER; note = 2'-deoxy-2'-fluorouridine-3'-phosphate
  modified_base 10: mod_base = OTHER; note = 2'-deoxy-2'-fluorouridine-3'-phosphate
  modified_base 11: mod_base = OTHER; note = 2'-deoxy-2'-fluorouridine-3'-phosphate
  modified_base 12: mod_base = OTHER; note = 2'-deoxy-2'-fluorouridine-3'-phosphate
  modified_base 14: mod_base = OTHER; note = 2'-deoxy-2'-fluorouridine-3'-phosphate
  modified_base 15: mod_base = OTHER; note = 2'-deoxy-2'-fluorouridine-3'-phosphate
  modified_base 16: mod_base = OTHER; note = 2'-deoxy-2'-fluorocytidine-3'-phosphate
gcctggaggtttattcggaa

SEQ ID NO: 1472 - RNA, 19 nt, synthetic construct
  source 1..19: mol_type = other RNA
  modified_base 1: mod_base = OTHER; note = 2'-O-methyluridine-3'-phosphate 5'phosphate
  modified_base 2: mod_base = OTHER; note = 2'-deoxy-2'-fluorouridine-3'-phosphate
  modified_base 3: mod_base = OTHER; note = 2'-O-methylcytidine-3'-phosphate
  modified_base 4: mod_base = OTHER; note = 2'-deoxy-2'-fluorocytidine-3'-phosphate
  modified_base 5: mod_base = OTHER; note = 2'-O-methylguanosine-3'-phosphate
  modified_base 6: mod_base = OTHER; note = 2'-deoxy-2'-fluoroadenosine-3'-phosphate
  modified_base 7: mod_base = OTHER; note = 2'-O-methyladenosine-3'-phosphate
  modified_base 8: mod_base = OTHER; note = 2'-deoxy-2'-fluorouridine-3'-phosphate
  modified_base 9: mod_base = OTHER; note = 2'-O-methyladenosine-3'-phosphate
  modified_base 10: mod_base = OTHER; note = 2'-deoxy-2'-fluoroadenosine-3'-phosphate
  modified_base 11: mod_base = OTHER; note = 2'-O-methyladenosine-3'-phosphate
  modified_base 12: mod_base = OTHER; note = 2'-deoxy-2'-fluorocytidine-3'-phosphate
  modified_base 13: mod_base = OTHER; note = 2'-O-methyluridine-3'-phosphate
  modified_base 14: mod_base = OTHER; note = 2'-deoxy-2'-fluorocytidine-3'-phosphate
  modified_base 15: mod_base = OTHER; note = 2'-O-methylcytidine-3'-phosphate
  modified_base 16: mod_base = OTHER; note = 2'-deoxy-2'-fluoroadenosine-3'-phosphate
  modified_base 17: mod_base = OTHER; note = 2'-O-methylguanosine-3'-phosphate
  modified_base 18: mod_base = OTHER; note = 2'-deoxy-2'-fluoroguanosine-3'-phosphate
  modified_base 19: mod_base = OTHER; note = 2'-O-methylcytidine
ttccgaataaactccaggc

SEQ ID NO: 1473 - RNA, 20 nt, synthetic construct
  source 1..20: mol_type = other RNA
  modified_base 2: mod_base = OTHER; note = 2'-deoxy-2'-fluorocytidine-3'-phosphate
  modified_base 3: mod_base = OTHER; note = 2'-deoxy-2'-fluorocytidine-3'-phosphate
  modified_base 4: mod_base = OTHER; note = 2'-deoxy-2'-fluorouridine-3'-phosphate
  modified_base 10: mod_base = OTHER; note = 2'-deoxy-2'-fluorouridine-3'-phosphate
  modified_base 11: mod_base = OTHER; note = 2'-deoxy-2'-fluorouridine-3'-phosphate
  modified_base 12: mod_base = OTHER; note = 2'-deoxy-2'-fluorouridine-3'-phosphate
  modified_base 14: mod_base = OTHER; note = 2'-deoxy-2'-fluorouridine-3'-phosphate
  modified_base 15: mod_base = OTHER; note = 2'-deoxy-2'-fluorouridine-3'-phosphate
  modified_base 16: mod_base = OTHER; note = 2'-deoxy-2'-fluorocytidine-3'-phosphate
gcctggaggtttattcggaa

SEQ ID NO: 1474 - RNA, 21 nt, synthetic construct
  source 1..21: mol_type = other RNA
  modified_base 1: mod_base = OTHER; note = 2'-O-methyluridine-3'-phosphate 5'phosphate
  modified_base 2: mod_base = OTHER; note = 2'-deoxy-2'-fluorouridine-3'-phosphate
  modified_base 3: mod_base = OTHER; note = 2'-O-methylcytidine-3'-phosphate
  modified_base 4: mod_base = OTHER; note = 2'-deoxy-2'-fluorocytidine-3'-phosphate
  modified_base 5: mod_base = OTHER; note = 2'-O-methylguanosine-3'-phosphate
  modified_base 6: mod_base = OTHER; note = 2'-deoxy-2'-fluoroadenosine-3'-phosphate
  modified_base 7: mod_base = OTHER; note = 2'-O-methyladenosine-3'-phosphate
  modified_base 8: mod_base = OTHER; note = 2'-deoxy-2'-fluorouridine-3'-phosphate
  modified_base 9: mod_base = OTHER; note = 2'-O-methyladenosine-3'-phosphate
  modified_base 10: mod_base = OTHER; note = 2'-deoxy-2'-fluoroadenosine-3'-phosphate
  modified_base 11: mod_base = OTHER; note = 2'-O-methyladenosine-3'-phosphate
  modified_base 12: mod_base = OTHER; note = 2'-deoxy-2'-fluorocytidine-3'-phosphate
  modified_base 13: mod_base = OTHER; note = 2'-O-methyluridine-3'-phosphate
  modified_base 14: mod_base = OTHER; note = 2'-deoxy-2'-fluorocytidine-3'-phosphate
  modified_base 15: mod_base = OTHER; note = 2'-O-methylcytidine-3'-phosphate
  modified_base 16: mod_base = OTHER; note = 2'-deoxy-2'-fluoroadenosine-3'-phosphate
  modified_base 17: mod_base = OTHER; note = 2'-O-methylguanosine-3'-phosphate
  modified_base 18: mod_base = OTHER; note = 2'-deoxy-2'-fluoroguanosine-3'-phosphate
  modified_base 19: mod_base = OTHER; note = 2'-O-methylcytidine-3'-phosphorothioate
  modified_base 20: mod_base = OTHER; note = 2'-deoxy-2'-fluorocytidine-3'-phosphorothioate
  modified_base 21: mod_base = OTHER; note = 2'-O-methyluridine
ttccgaataaactccaggcct

SEQ ID NO: 1475 - RNA, 20 nt, synthetic construct
  source 1..20: mol_type = other RNA
  modified_base 2: mod_base = OTHER; note = 2'-deoxy-2'-fluorocytidine-3'-phosphate
  modified_base 3: mod_base = OTHER; note = 2'-deoxy-2'-fluorocytidine-3'-phosphate
  modified_base 4: mod_base = OTHER; note = 2'-deoxy-2'-fluorouridine-3'-phosphate
  modified_base 10: mod_base = OTHER; note = 2'-deoxy-2'-fluorouridine-3'-phosphate
  modified_base 11: mod_base = OTHER; note = 2'-deoxy-2'-fluorouridine-3'-phosphate
  modified_base 12: mod_base = OTHER; note = 2'-deoxy-2'-fluorouridine-3'-phosphate
  modified_base 14: mod_base = OTHER; note = 2'-deoxy-2'-fluorouridine-3'-phosphate
  modified_base 15: mod_base = OTHER; note = 2'-deoxy-2'-fluorouridine-3'-phosphate
  modified_base 16: mod_base = OTHER; note = 2'-deoxy-2'-fluorocytidine-3'-phosphate
gcctggaggtttattcggaa

SEQ ID NO: 1476 - RNA, 21 nt, synthetic construct
  source 1..21: mol_type = other RNA
  modified_base 19: mod_base = OTHER; note = cytidine-3'-phosphorothioate
  modified_base 20: mod_base = OTHER; note = 2'-O-methylcytidine-3'-phosphorothioate
  modified_base 21: mod_base = OTHER; note = 2'-O-methyluridine
ttccgaataaactccaggcct

SEQ ID NO: 1477 - RNA, 20 nt, synthetic construct
  source 1..20: mol_type = other RNA
  modified_base 2: mod_base = OTHER; note = 2'-deoxy-2'-fluorocytidine-3'-phosphate
  modified_base 3: mod_base = OTHER; note = 2'-deoxy-2'-fluorocytidine-3'-phosphate
  modified_base 4: mod_base = OTHER; note = 2'-deoxy-2'-fluorouridine-3'-phosphate
  modified_base 10: mod_base = OTHER; note = 2'-deoxy-2'-fluorouridine-3'-phosphate
  modified_base 11: mod_base = OTHER; note = 2'-deoxy-2'-fluorouridine-3'-phosphate
  modified_base 12: mod_base = OTHER; note = 2'-deoxy-2'-fluorouridine-3'-phosphate
  modified_base 14: mod_base = OTHER; note = 2'-deoxy-2'-fluorouridine-3'-phosphate
  modified_base 15: mod_base = OTHER; note = 2'-deoxy-2'-fluorouridine-3'-phosphate
  modified_base 16: mod_base = OTHER; note = 2'-deoxy-2'-fluorocytidine-3'-phosphate
gcctggaggtttattcggaa

SEQ ID NO: 1478 - RNA, 19 nt, synthetic construct
  source 1..19: mol_type = other RNA
  modified_base 6: mod_base = OTHER; note = 2'-O-methyladenosine-3'-phosphate
  modified_base 7: mod_base = OTHER; note = 2'-O-methyladenosine-3'-phosphate
  modified_base 10: mod_base = OTHER; note = 2'-O-methyladenosine-3'-phosphate
  modified_base 11: mod_base = OTHER; note = 2'-O-methyladenosine-3'-phosphate
  modified_base 17: mod_base = OTHER; note = 2'-O-methylguanosine-3'-phosphate
  modified_base 18: mod_base = OTHER; note = 2'-O-methylguanosine-3'-phosphate
  modified_base 19: mod_base = OTHER; note = 2'-O-methylcytidine
ttccgaataaactccaggc

SEQ ID NO: 1479 - RNA, 20 nt, synthetic construct
  source 1..20: mol_type = other RNA
  modified_base 2: mod_base = OTHER; note = 2'-deoxy-2'-fluorocytidine-3'-phosphate
  modified_base 3: mod_base = OTHER; note = 2'-deoxy-2'-fluorocytidine-3'-phosphate
  modified_base 4: mod_base = OTHER; note = 2'-deoxy-2'-fluorouridine-3'-phosphate
  modified_base 10: mod_base = OTHER; note = 2'-deoxy-2'-fluorouridine-3'-phosphate
  modified_base 11: mod_base = OTHER; note = 2'-deoxy-2'-fluorouridine-3'-phosphate
  modified_base 12: mod_base = OTHER; note = 2'-deoxy-2'-fluorouridine-3'-phosphate
  modified_base 14: mod_base = OTHER; note = 2'-deoxy-2'-fluorouridine-3'-phosphate
  modified_base 15: mod_base = OTHER; note = 2'-deoxy-2'-fluorouridine-3'-phosphate
  modified_base 16: mod_base = OTHER; note = 2'-deoxy-2'-fluorocytidine-3'-phosphate
gcctggaggtttattcggaa

SEQ ID NO: 1480 - DNA, 21 bp, synthetic construct
  source 1..21: mol_type = other DNA
  modified_base 1: mod_base = OTHER; note = uridine-3'-phosphate
  modified_base 2: mod_base = OTHER; note = uridine-3'-phosphate
  modified_base 3: mod_base = OTHER; note = cytidine-3'-phosphate
  modified_base 4: mod_base = OTHER; note = cytidine-3'-phosphate
  modified_base 5: mod_base = OTHER; note = guanosine-3'-phosphate
  modified_base 6: mod_base = OTHER; note = adenosine-3'-phosphate
  modified_base 7: mod_base = OTHER; note = adenosine-3'-phosphate
  modified_base 8: mod_base = OTHER; note = uridine-3'-phosphate
  modified_base 9: mod_base = OTHER; note = adenosine-3'-phosphate
  modified_base 10: mod_base = OTHER; note = adenosine-3'-phosphate
  modified_base 11: mod_base = OTHER; note = adenosine-3'-phosphate
  modified_base 12: mod_base = OTHER; note = cytidine-3'-phosphate
  modified_base 13: mod_base = OTHER; note = uridine-3'-phosphate
  modified_base 14: mod_base = OTHER; note = cytidine-3'-phosphate
  modified_base 15: mod_base = OTHER; note = cytidine-3'-phosphate
  modified_base 16: mod_base = OTHER; note = adenosine-3'-phosphate
  modified_base 17: mod_base = OTHER; note = guanosine-3'-phosphate
  modified_base 18: mod_base = OTHER; note = guanosine-3'-phosphate
  modified_base 19: mod_base = OTHER; note = cytidine-3'-phosphate
  modified_base 20: mod_base = OTHER; note = 2'-deoxythymidine-3'-phosphorothioate
  misc_feature 1..19: note = RNA
  misc_feature 20..21: note = DNA
ttccgaataaactccaggctt

SEQ ID NO: 1481 - RNA, 20 nt, synthetic construct
  source 1..20: mol_type = other RNA
  modified_base 2: mod_base = OTHER; note = 2'-deoxy-2'-fluorocytidine-3'-phosphate
  modified_base 3: mod_base = OTHER; note = 2'-deoxy-2'-fluorocytidine-3'-phosphate
  modified_base 4: mod_base = OTHER; note = 2'-deoxy-2'-fluorouridine-3'-phosphate
  modified_base 10: mod_base = OTHER; note = 2'-deoxy-2'-fluorouridine-3'-phosphate
  modified_base 11: mod_base = OTHER; note = 2'-deoxy-2'-fluorouridine-3'-phosphate
  modified_base 12: mod_base = OTHER; note = 2'-deoxy-2'-fluorouridine-3'-phosphate
  modified_base 14: mod_base = OTHER; note = 2'-deoxy-2'-fluorouridine-3'-phosphate
  modified_base 15: mod_base = OTHER; note = 2'-deoxy-2'-fluorouridine-3'-phosphate
  modified_base 16: mod_base = OTHER; note = 2'-deoxy-2'-fluorocytidine-3'-phosphate
gcctggaggtttattcggaa

SEQ ID NO: 1482 - DNA, 21 bp, synthetic construct
  source 1..21: mol_type = other DNA
  modified_base 1: mod_base = OTHER; note = uridine-3'-phosphate
  modified_base 2: mod_base = OTHER; note = uridine-3'-phosphate
  modified_base 3: mod_base = OTHER; note = cytidine-3'-phosphate
  modified_base 4: mod_base = OTHER; note = cytidine-3'-phosphate
  modified_base 5: mod_base = OTHER; note = guanosine-3'-phosphate
  modified_base 6: mod_base = OTHER; note = adenosine-3'-phosphate
  modified_base 7: mod_base = OTHER; note = adenosine-3'-phosphate
  modified_base 8: mod_base = OTHER; note = 2'-O-methyluridine-3'-phosphate
  modified_base 9: mod_base = OTHER; note = adenosine-3'-phosphate
  modified_base 10: mod_base = OTHER; note = adenosine-3'-phosphate
  modified_base 11: mod_base = OTHER; note = adenosine-3'-phosphate
  modified_base 12: mod_base = OTHER; note = cytidine-3'-phosphate
  modified_base 13: mod_base = OTHER; note = uridine-3'-phosphate
  modified_base 14: mod_base = OTHER; note = cytidine-3'-phosphate
  modified_base 15: mod_base = OTHER; note = 2'-O-methylcytidine-3'-phosphate
  modified_base 16: mod_base = OTHER; note = adenosine-3'-phosphate
  modified_base 17: mod_base = OTHER; note = guanosine-3'-phosphate
  modified_base 18: mod_base = OTHER; note = guanosine-3'-phosphate
  modified_base 19: mod_base = OTHER; note = cytidine-3'-phosphate
  modified_base 20: mod_base = OTHER; note = 2'-deoxythymidine-3'-phosphorothioate
  misc_feature 1..19: note = RNA
  misc_feature 20..21: note = DNA
ttccgaataaactccaggctt

SEQ ID NO: 1483 - RNA, 20 nt, synthetic construct
  source 1..20: mol_type = other RNA
  modified_base 2: mod_base = OTHER; note = 2'-deoxy-2'-fluorocytidine-3'-phosphate
  modified_base 3: mod_base = OTHER; note = 2'-deoxy-2'-fluorocytidine-3'-phosphate
  modified_base 4: mod_base = OTHER; note = 2'-deoxy-2'-fluorouridine-3'-phosphate
  modified_base 10: mod_base = OTHER; note = 2'-deoxy-2'-fluorouridine-3'-phosphate
  modified_base 11: mod_base = OTHER; note = 2'-deoxy-2'-fluorouridine-3'-phosphate
  modified_base 12: mod_base = OTHER; note = 2'-deoxy-2'-fluorouridine-3'-phosphate
  modified_base 14: mod_base = OTHER; note = 2'-deoxy-2'-fluorouridine-3'-phosphate
  modified_base 15: mod_base = OTHER; note = 2'-deoxy-2'-fluorouridine-3'-phosphate
  modified_base 16: mod_base = OTHER; note = 2'-deoxy-2'-fluorocytidine-3'-phosphate
gcctggaggtttattcggaa

SEQ ID NO: 1484 - DNA, 21 bp, synthetic construct
  source 1..21: mol_type = other DNA
  modified_base 1: mod_base = OTHER; note = 2'-O-methyluridine-3'-phosphate
  modified_base 2: mod_base = OTHER; note = uridine-3'-phosphate
  modified_base 3: mod_base = OTHER; note = 2'-O-methylcytidine-3'-phosphate
  modified_base 4: mod_base = OTHER; note = cytidine-3'-phosphate
  modified_base 5: mod_base = OTHER; note = guanosine-3'-phosphate
  modified_base 6: mod_base = OTHER; note = adenosine-3'-phosphate
  modified_base 7: mod_base = OTHER; note = adenosine-3'-phosphate
  modified_base 8: mod_base = OTHER; note = 2'-O-methyluridine-3'-phosphate
  modified_base 9: mod_base = OTHER; note = adenosine-3'-phosphate
  modified_base 10: mod_base = OTHER; note = adenosine-3'-phosphate
  modified_base 11: mod_base = OTHER; note = adenosine-3'-phosphate
  modified_base 12: mod_base = OTHER; note = cytidine-3'-phosphate
  modified_base 13: mod_base = OTHER; note = uridine-3'-phosphate
  modified_base 14: mod_base = OTHER; note = 2'-O-methylcytidine-3'-phosphate
  modified_base 15: mod_base = OTHER; note = 2'-O-methylcytidine-3'-phosphate
  modified_base 16: mod_base = OTHER; note = adenosine-3'-phosphate
  modified_base 17: mod_base = OTHER; note = guanosine-3'-phosphate
  modified_base 18: mod_base = OTHER; note = guanosine-3'-phosphate
  modified_base 19: mod_base = OTHER; note = cytidine-3'-phosphate
  modified_base 20: mod_base = OTHER; note = 2'-deoxythymidine-3'-phosphorothioate
  misc_feature 1..19: note = RNA
  misc_feature 20..21: note = DNA
ttccgaataaactccaggctt

SEQ ID NO: 1485 - DNA, 21 bp, synthetic construct
  source 1..21: mol_type = other DNA
  modified_base 1: mod_base = OTHER; note = guanosine-3'-phosphate
  modified_base 2: mod_base = OTHER; note = 2'-O-methoxyethylcytidine-3'-phosphate
  modified_base 3: mod_base = OTHER; note = cytidine-3'-phosphate
  modified_base 4: mod_base = OTHER; note = 2'-O-methoxyethyluridine-3'-phosphate
  modified_base 5: mod_base = OTHER; note = guanosine-3'-phosphate
  modified_base 6: mod_base = OTHER; note = 2'-O-methoxyethylguanosine-3'-phosphate
  modified_base 7: mod_base = OTHER; note = adenosine-3'-phosphate
  modified_base 8: mod_base = OTHER; note = 2'-O-methoxyethylguanosine-3'-phosphate
  modified_base 9: mod_base = OTHER; note = uridine-3'-phosphate
  modified_base 10: mod_base = OTHER; note = 2'-O-methoxyethyluridine-3'-phosphate
  modified_base 11: mod_base = OTHER; note = uridine-3'-phosphate
  modified_base 12: mod_base = OTHER; note = 2'-O-methoxyethyladenosine-3'-phosphate
  modified_base 13: mod_base = OTHER; note = uridine-3'-phosphate
  modified_base 14: mod_base = OTHER; note = 2'-O-methoxyethyluridine-3'-phosphate
  modified_base 15: mod_base = OTHER; note = cytidine-3'-phosphate
  modified_base 16: mod_base = OTHER; note = 2'-O-methoxyethylguanosine-3'-phosphate
  modified_base 17: mod_base = OTHER; note = guanosine-3'-phosphate
  modified_base 18: mod_base = OTHER; note = 2'-O-methoxyethyladenosine-3'-phosphate
  modified_base 19: mod_base = OTHER; note = adenosine-3'-phosphate
  modified_base 20: mod_base = OTHER; note = 2'-deoxythymidine-3'-phosphorothioate
  misc_feature 1..19: note = RNA
  misc_feature 20..21: note = DNA
gcctggagtttattcggaatt

SEQ ID NO: 1486 - RNA, 21 nt, synthetic construct
  source 1..21: mol_type = other RNA
  modified_base 1: mod_base = OTHER; note = 2'-deoxy-2'-fluorouridine-3'-phosphate 5'phosphate
  modified_base 2: mod_base = OTHER; note = 2'-deoxy-2'-fluorouridine-3'-phosphate
  modified_base 3: mod_base = OTHER; note = 2'-deoxy-2'-fluorocytidine-3'-phosphate
  modified_base 4: mod_base = OTHER; note = 2'-deoxy-2'-fluorocytidine-3'-phosphate
  modified_base 8: mod_base = OTHER; note = 2'-deoxy-2'-fluorouridine-3'-phosphate
  modified_base 12: mod_base = OTHER; note = 2'-deoxy-2'-fluorocytidine-3'-phosphate
  modified_base 13: mod_base = OTHER; note = 2'-deoxy-2'-fluorouridine-3'-phosphate
  modified_base 14: mod_base = OTHER; note = 2'-deoxy-2'-fluorocytidine-3'-phosphate
  modified_base 15: mod_base = OTHER; note = 2'-deoxy-2'-fluorocytidine-3'-phosphate
  modified_base 19: mod_base = OTHER; note = 2'-deoxy-2'-fluorocytidine-3'-phosphorothioate
  modified_base 20: mod_base = OTHER; note = 2'-deoxy-2'-fluorocytidine-3'-phosphorothioate
  modified_base 21: mod_base = OTHER; note = 2'-deoxy-2'-fluorouridine
ttccgaataaactccaggcct

SEQ ID NO: 1487 - RNA, 19 nt, synthetic construct
  source 1..19: mol_type = other RNA
  modified_base 2: mod_base = OTHER; note = 2'-O-methoxyethylcytidine-3'-phosphate
  modified_base 4: mod_base = OTHER; note = 2'-O-methoxyethyluridine-3'-phosphate
  modified_base 6: mod_base = OTHER; note = 2'-O-methoxyethylguanosine-3'-phosphate
  modified_base 8: mod_base = OTHER; note = modified guanosine 3'-phosphate
  modified_base 10: mod_base = OTHER; note = 2'-O-methoxyethyluridine-3'-phosphate
  modified_base 12: mod_base = OTHER; note = 2'-O-methoxyethyladenosine-3'-phosphate
  modified_base 14: mod_base = OTHER; note = 2'-O-methoxyethyluridine-3'-phosphate
  modified_base 16: mod_base = OTHER; note = 2'-O-methoxyethylguanosine-3'-phosphate
  modified_base 18: mod_base = OTHER; note = 2'-O-methoxyethyladenosine-3'-phosphate
gcctggagtttattcggaa

SEQ ID NO: 1488 - RNA, 21 nt, synthetic construct
  source 1..21: mol_type = other RNA
  modified_base 1: mod_base = OTHER; note = 2'-deoxy-2'-fluorouridine-3'-phosphate 5'phosphate
  modified_base 2: mod_base = OTHER; note = 2'-deoxy-2'-fluorouridine-3'-phosphate
  modified_base 3: mod_base = OTHER; note = 2'-deoxy-2'-fluorocytidine-3'-phosphate
  modified_base 4: mod_base = OTHER; note = 2'-deoxy-2'-fluorocytidine-3'-phosphate
  modified_base 8: mod_base = OTHER; note = 2'-deoxy-2'-fluorouridine-3'-phosphate
  modified_base 12: mod_base = OTHER; note = 2'-deoxy-2'-fluorocytidine-3'-phosphate
  modified_base 13: mod_base = OTHER; note = 2'-deoxy-2'-fluorouridine-3'-phosphate
  modified_base 14: mod_base = OTHER; note = 2'-deoxy-2'-fluorocytidine-3'-phosphate
  modified_base 15: mod_base = OTHER; note = 2'-deoxy-2'-fluorocytidine-3'-phosphate
  modified_base 19: mod_base = OTHER; note = 2'-deoxy-2'-fluorocytidine-3'-phosphorothioate
  modified_base 20: mod_base = OTHER; note = 2'-deoxy-2'-fluorocytidine-3'-phosphorothioate
  modified_base 21: mod_base = OTHER; note = 2'-deoxy-2'-fluorouridine
ttccgaataaactccaggcct

SEQ ID NO: 1489 - RNA, 19 nt, synthetic construct
  source 1..19: mol_type = other RNA
  modified_base 1: mod_base = OTHER; note = 2'-deoxy-2'-fluoroguanosine-3'-phosphate
  modified_base 2: mod_base = OTHER; note = 2'-O-methylcytidine-3'-phosphate
  modified_base 3: mod_base = OTHER; note = 2'-deoxy-2'-fluorocytidine-3'-phosphate
  modified_base 4: mod_base = OTHER; note = 2'-O-methyluridine-3'-phosphate
  modified_base 5: mod_base = OTHER; note = 2'-deoxy-2'-fluoroguanosine-3'-phosphate
  modified_base 6: mod_base = OTHER; note = 2'-O-methylguanosine-3'-phosphate
  modified_base 7: mod_base = OTHER; note = 2'-deoxy-2'-fluoroadenosine-3'-phosphate
  modified_base 8: mod_base = OTHER; note = 2'-O-methylguanosine-3'-phosphate
  modified_base 9: mod_base = OTHER; note = 2'-deoxy-2'-fluorouridine-3'-phosphate
  modified_base 10: mod_base = OTHER; note = 2'-O-methyluridine-3'-phosphate
  modified_base 11: mod_base = OTHER; note = 2'-deoxy-2'-fluorouridine-3'-phosphate
  modified_base 12: mod_base = OTHER; note = 2'-O-methyladenosine-3'-phosphate
  modified_base 13: mod_base = OTHER; note = 2'-deoxy-2'-fluorouridine-3'-phosphate
  modified_base 14: mod_base = OTHER; note = 2'-O-methyluridine-3'-phosphate
  modified_base 15: mod_base = OTHER; note = 2'-deoxy-2'-fluorocytidine-3'-phosphate
  modified_base 16: mod_base = OTHER; note = 2'-O-methylguanosine-3'-phosphate
  modified_base 17: mod_base = OTHER; note = 2'-deoxy-2'-fluoroguanosine-3'-phosphate
  modified_base 18: mod_base = OTHER; note = 2'-O-methyladenosine-3'-phosphate
  modified_base 19: mod_base = OTHER; note = 2'-deoxy-2'-fluoroadenosine
gcctggagtttattcggaa

SEQ ID NO: 1490 - RNA, 21 nt, synthetic construct
  source 1..21: mol_type = other RNA
  modified_base 1: mod_base = OTHER; note = 2'-deoxy-2'-fluorouridine-3'-phosphate 5'phosphate
  modified_base 2: mod_base = OTHER; note = 2'-deoxy-2'-fluorouridine-3'-phosphate
  modified_base 3: mod_base = OTHER; note = 2'-deoxy-2'-fluorocytidine-3'-phosphate
  modified_base 4: mod_base = OTHER; note = 2'-deoxy-2'-fluorocytidine-3'-phosphate
  modified_base 8: mod_base = OTHER; note = 2'-deoxy-2'-fluorouridine-3'-phosphate
  modified_base 12: mod_base = OTHER; note = 2'-deoxy-2'-fluorocytidine-3'-phosphate
  modified_base 13: mod_base = OTHER; note = 2'-deoxy-2'-fluorouridine-3'-phosphate
  modified_base 14: mod_base = OTHER; note = 2'-deoxy-2'-fluorocytidine-3'-phosphate
  modified_base 15: mod_base = OTHER; note = 2'-deoxy-2'-fluorocytidine-3'-phosphate
  modified_base 19: mod_base = OTHER; note = 2'-deoxy-2'-fluorocytidine-3'-phosphorothioate
  modified_base 20: mod_base = OTHER; note = 2'-deoxy-2'-fluorocytidine-3'-phosphorothioate
  modified_base 21: mod_base = OTHER; note = 2'-deoxy-2'-fluorouridine
ttccgaataaactccaggcct

SEQ ID NO: 1491 - DNA, 21 bp, synthetic construct
  source 1..21: mol_type = other DNA
  modified_base 1: mod_base = OTHER; note = 2'-deoxy-2'-fluoroguanosine-3'-phosphate
  modified_base 2: mod_base = OTHER; note = 2'-O-methylcytidine-3'-phosphate
  modified_base 3: mod_base = OTHER; note = 2'-deoxy-2'-fluorocytidine-3'-phosphate
  modified_base 4: mod_base = OTHER; note = 2'-O-methyluridine-3'-phosphate
  modified_base 5: mod_base = OTHER; note = 2'-deoxy-2'-fluoroguanosine-3'-phosphate
  modified_base 6: mod_base = OTHER; note = 2'-O-methylguanosine-3'-phosphate
  modified_base 7: mod_base = OTHER; note = 2'-deoxy-2'-fluoroadenosine-3'-phosphate
  modified_base 8: mod_base = OTHER; note = 2'-O-methylguanosine-3'-phosphate
  modified_base 9: mod_base = OTHER; note = 2'-deoxy-2'-fluorouridine-3'-phosphate
  modified_base 10: mod_base = OTHER; note = 2'-O-methyluridine-3'-phosphate
  modified_base 11: mod_base = OTHER; note = 2'-deoxy-2'-fluorouridine-3'-phosphate
  modified_base 12: mod_base = OTHER; note = 2'-O-methyladenosine-3'-phosphate
  modified_base 13: mod_base = OTHER; note = 2'-deoxy-2'-fluorouridine-3'-phosphate
  modified_base 14: mod_base = OTHER; note = 2'-O-methyluridine-3'-phosphate
  modified_base 15: mod_base = OTHER; note = 2'-deoxy-2'-fluorocytidine-3'-phosphate
  modified_base 16: mod_base = OTHER; note = 2'-O-methylguanosine-3'-phosphate
  modified_base 17: mod_base = OTHER; note = 2'-deoxy-2'-fluoroguanosine-3'-phosphate
  modified_base 18: mod_base = OTHER; note = 2'-O-methyladenosine-3'-phosphate
  modified_base 19: mod_base = OTHER; note = 2'-deoxy-2'-fluoroadenosine-3'-phosphate
  modified_base 20: mod_base = OTHER; note = 2'-deoxythymidine-3'-phosphorothioate
  misc_feature 1..19: note = RNA
  misc_feature 20..21: note = DNA
gcctggagtttattcggaatt

SEQ ID NO: 1492 - RNA, 21 nt, synthetic construct
  source 1..21: mol_type = other RNA
  modified_base 1: mod_base = OTHER; note = 2'-deoxy-2'-fluorouridine-3'-phosphate 5'phosphate
  modified_base 2: mod_base = OTHER; note = 2'-deoxy-2'-fluorouridine-3'-phosphate
  modified_base 3: mod_base = OTHER; note = 2'-deoxy-2'-fluorocytidine-3'-phosphate
  modified_base 4: mod_base = OTHER; note = 2'-deoxy-2'-fluorocytidine-3'-phosphate
  modified_base 8: mod_base = OTHER; note = 2'-deoxy-2'-fluorouridine-3'-phosphate
  modified_base 12: mod_base = OTHER; note = 2'-deoxy-2'-fluorocytidine-3'-phosphate
  modified_base 13: mod_base = OTHER; note = 2'-deoxy-2'-fluorouridine-3'-phosphate
  modified_base 14: mod_base = OTHER; note = 2'-deoxy-2'-fluorocytidine-3'-phosphate
  modified_base 15: mod_base = OTHER; note = 2'-deoxy-2'-fluorocytidine-3'-phosphate
  modified_base 19: mod_base = OTHER; note = 2'-deoxy-2'-fluorocytidine-3'-phosphorothioate
  modified_base 20: mod_base = OTHER; note = 2'-deoxy-2'-fluorocytidine-3'-phosphorothioate
  modified_base 21: mod_base = OTHER; note = 2'-deoxy-2'-fluorouridine
ttccgaataaactccaggcct

SEQ ID NO: 1493 - DNA, 21 bp, synthetic construct
  source 1..21: mol_type = other DNA
  modified_base 1: mod_base = OTHER; note = guanosine-3'-phosphate
  modified_base 2: mod_base = OTHER; note = 2'-O-methylcytidine-3'-phosphate
  modified_base 3: mod_base = OTHER; note = cytidine-3'-phosphate
  modified_base 4: mod_base = OTHER; note = 2'-O-methyluridine-3'-phosphate
  modified_base 5: mod_base = OTHER; note = guanosine-3'-phosphate
  modified_base 6: mod_base = OTHER; note = 2'-O-methylguanosine-3'-phosphate
  modified_base 7: mod_base = OTHER; note = adenosine-3'-phosphate
  modified_base 8: mod_base = OTHER; note = 2'-O-methylguanosine-3'-phosphate
  modified_base 9: mod_base = OTHER; note = uridine-3'-phosphate
  modified_base 10: mod_base = OTHER; note = 2'-O-methyluridine-3'-phosphate
  modified_base 11: mod_base = OTHER; note = uridine-3'-phosphate
  modified_base 12: mod_base = OTHER; note = 2'-O-methyladenosine-3'-phosphate
  modified_base 13: mod_base = OTHER; note = uridine-3'-phosphate
  modified_base 14: mod_base = OTHER; note = 2'-O-methyluridine-3'-phosphate
  modified_base 15: mod_base = OTHER; note = cytidine-3'-phosphate
  modified_base 16: mod_base = OTHER; note = 2'-O-methylguanosine-3'-phosphate
  modified_base 17: mod_base = OTHER; note = guanosine-3'-phosphate
  modified_base 18: mod_base = OTHER; note = 2'-O-methyladenosine-3'-phosphate
  modified_base 19: mod_base = OTHER; note = adenosine-3'-phosphate
  modified_base 20: mod_base = OTHER; note = 2'-deoxythymidine-3'-phosphorothioate
  misc_feature 1..19: note = RNA
  misc_feature 20..21: note = DNA
gcctggagtttattcggaatt

SEQ ID NO: 1494 - RNA, 21 nt, synthetic construct
  source 1..21: mol_type = other RNA
  modified_base 1: mod_base = OTHER; note = 2'-deoxy-2'-fluorouridine-3'-phosphate 5'phosphate
  modified_base 2: mod_base = OTHER; note = 2'-deoxy-2'-fluorouridine-3'-phosphate
  modified_base 3: mod_base = OTHER; note = 2'-deoxy-2'-fluorocytidine-3'-phosphate
  modified_base 4: mod_base = OTHER; note = 2'-deoxy-2'-fluorocytidine-3'-phosphate
  modified_base 8: mod_base = OTHER; note = 2'-deoxy-2'-fluorouridine-3'-phosphate
  modified_base 12: mod_base = OTHER; note = 2'-deoxy-2'-fluorocytidine-3'-phosphate
  modified_base 13: mod_base = OTHER; note = 2'-deoxy-2'-fluorouridine-3'-phosphate
  modified_base 14: mod_base = OTHER; note = 2'-deoxy-2'-fluorocytidine-3'-phosphate
  modified_base 15: mod_base = OTHER; note = 2'-deoxy-2'-fluorocytidine-3'-phosphate
  modified_base 19: mod_base = OTHER; note = 2'-deoxy-2'-fluorocytidine-3'-phosphorothioate
  modified_base 20: mod_base = OTHER; note = 2'-deoxy-2'-fluorocytidine-3'-phosphorothioate
  modified_base 21: mod_base = OTHER; note = 2'-deoxy-2'-fluorouridine
ttccgaataaactccaggcct

SEQ ID NO: 1495 - DNA, 21 bp, synthetic construct
  source 1..21: mol_type = other DNA
  modified_base 1: mod_base = OTHER; note = guanosine-3'-phosphate
  modified_base 2: mod_base = OTHER; note = cytidine-3'-phosphate
  modified_base 3: mod_base = OTHER; note = cytidine-3'-phosphate
  modified_base 4: mod_base = OTHER; note = uridine-3'-phosphate
  modified_base 5: mod_base = OTHER; note = guanosine-3'-phosphate
  modified_base 6: mod_base = OTHER; note = guanosine-3'-phosphate
  modified_base 7: mod_base = OTHER; note = adenosine-3'-phosphate
  modified_base 8: mod_base = OTHER; note = guanosine-3'-phosphate
  modified_base 9: mod_base = OTHER; note = uridine-3'-phosphate
  modified_base 10: mod_base = OTHER; note = uridine-3'-phosphate
  modified_base 11: mod_base = OTHER; note = uridine-3'-phosphate
  modified_base 12: mod_base = OTHER; note = adenosine-3'-phosphate
  modified_base 13: mod_base = OTHER; note = uridine-3'-phosphate
  modified_base 14: mod_base = OTHER; note = uridine-3'-phosphate
  modified_base 15: mod_base = OTHER; note = cytidine-3'-phosphate
  modified_base 16: mod_base = OTHER; note = guanosine-3'-phosphate
  modified_base 17: mod_base = OTHER; note = guanosine-3'-phosphate
  modified_base 18: mod_base = OTHER; note = adenosine-3'-phosphate
  modified_base 19: mod_base = OTHER; note = adenosine-3'-phosphate
  modified_base 20: mod_base = OTHER; note = 2'-deoxythymidine-3'-phosphorothioate
  misc_feature 1..19: note = RNA
  misc_feature 20..21: note = DNA
gcctggagtttattcggaatt

SEQ ID NO: 1496 - RNA, 21 nt, synthetic construct
  source 1..21: mol_type = other RNA
  modified_base 1: mod_base = OTHER; note = 2'-deoxy-2'-fluorouridine-3'-phosphate 5'phosphate
  modified_base 2: mod_base = OTHER; note = 2'-deoxy-2'-fluorouridine-3'-phosphate
  modified_base 3: mod_base = OTHER; note = 2'-deoxy-2'-fluorocytidine-3'-phosphate
  modified_base 4: mod_base = OTHER; note = 2'-deoxy-2'-fluorocytidine-3'-phosphate
  modified_base 8: mod_base = OTHER; note = 2'-deoxy-2'-fluorouridine-3'-phosphate
  modified_base 12: mod_base = OTHER; note = 2'-deoxy-2'-fluorocytidine-3'-phosphate
  modified_base 13: mod_base = OTHER; note = 2'-deoxy-2'-fluorouridine-3'-phosphate
  modified_base 14: mod_base = OTHER; note = 2'-deoxy-2'-fluorocytidine-3'-phosphate
  modified_base 15: mod_base = OTHER; note = 2'-deoxy-2'-fluorocytidine-3'-phosphate
  modified_base 19: mod_base = OTHER; note = 2'-deoxy-2'-fluorocytidine-3'-phosphorothioate
  modified_base 20: mod_base = OTHER; note = 2'-deoxy-2'-fluorocytidine-3'-phosphorothioate
  modified_base 21: mod_base = OTHER; note = 2'-deoxy-2'-fluorouridine
ttccgaataaactccaggcct

SEQ ID NO: 1497 - DNA, 21 bp, synthetic construct
  source 1..21: mol_type = other DNA
  modified_base 1: mod_base = OTHER; note = guanosine-3'-phosphate
  modified_base 2: mod_base = OTHER; note = 2'-O-methylcytidine-3'-phosphate
  modified_base 3: mod_base = OTHER; note = 2'-O-methylcytidine-3'-phosphate
  modified_base 4: mod_base = OTHER; note = 2'-O-methyluridine-3'-phosphate
  modified_base 5: mod_base = OTHER; note = guanosine-3'-phosphate
  modified_base 6: mod_base = OTHER; note = guanosine-3'-phosphate
  modified_base 7: mod_base = OTHER; note = adenosine-3'-phosphate
  modified_base 8: mod_base = OTHER; note = guanosine-3'-phosphate
  modified_base 9: mod_base = OTHER; note = 2'-O-methyluridine-3'-phosphate
  modified_base 10: mod_base = OTHER; note = 2'-O-methyluridine-3'-phosphate
  modified_base 11: mod_base = OTHER; note = 2'-O-methyluridine-3'-phosphate
  modified_base 12: mod_base = OTHER; note = adenosine-3'-phosphate
  modified_base 13: mod_base = OTHER; note = 2'-O-methyluridine-3'-phosphate
  modified_base 14: mod_base = OTHER; note = 2'-O-methyluridine-3'-phosphate
  modified_base 15: mod_base = OTHER; note = 2'-O-methylcytidine-3'-phosphate
  modified_base 16: mod_base = OTHER; note = guanosine-3'-phosphate
  modified_base 17: mod_base = OTHER; note = guanosine-3'-phosphate
  modified_base 18: mod_base = OTHER; note = adenosine-3'-phosphate
  modified_base 19: mod_base = OTHER; note = adenosine-3'-phosphate
  modified_base 20: mod_base = OTHER; note = 2'-deoxythymidine-3'-phosphorothioate
  misc_feature 1..19: note = RNA
  misc_feature 20..21: note = DNA
gcctggagtttattcggaatt

SEQ ID NO: 1498 - RNA, 21 nt, synthetic construct
  source 1..21: mol_type = other RNA
  modified_base 1: mod_base = OTHER; note = 2'-deoxy-2'-fluorouridine-3'-phosphate 5'phosphate
  modified_base 2: mod_base = OTHER; note = 2'-deoxy-2'-fluorouridine-3'-phosphate
  modified_base 3: mod_base = OTHER; note = 2'-deoxy-2'-fluorocytidine-3'-phosphate
  modified_base 4: mod_base = OTHER; note = 2'-deoxy-2'-fluorocytidine-3'-phosphate
  modified_base 8: mod_base = OTHER; note = 2'-deoxy-2'-fluorouridine-3'-phosphate
  modified_base 12: mod_base = OTHER; note = 2'-deoxy-2'-fluorocytidine-3'-phosphate
  modified_base 13: mod_base = OTHER; note = 2'-deoxy-2'-fluorouridine-3'-phosphate
  modified_base 14: mod_base = OTHER; note = 2'-deoxy-2'-fluorocytidine-3'-phosphate
  modified_base 15: mod_base = OTHER; note = 2'-deoxy-2'-fluorocytidine-3'-phosphate
  modified_base 19: mod_base = OTHER; note = 2'-deoxy-2'-fluorocytidine-3'-phosphorothioate
  modified_base 20: mod_base = OTHER; note = 2'-deoxy-2'-fluorocytidine-3'-phosphorothioate
  modified_base 21: mod_base = OTHER; note = 2'-deoxy-2'-fluorouridine
ttccgaataaactccaggcct

SEQ ID NO: 1499 - RNA, 19 nt, synthetic construct
  source 1..19: mol_type = other RNA
  modified_base 2: mod_base = OTHER; note = 2'-O-methylcytidine-3'-phosphate
  modified_base 3: mod_base = OTHER; note = 2'-O-methylcytidine-3'-phosphate
  modified_base 4: mod_base = OTHER; note = 2'-O-methyluridine-3'-phosphate
  modified_base 9: mod_base = OTHER; note = 2'-O-methyluridine-3'-phosphate
  modified_base 10: mod_base = OTHER; note = 2'-O-methyluridine-3'-phosphate
  modified_base 11: mod_base = OTHER; note = 2'-O-methyluridine-3'-phosphate
  modified_base 13: mod_base = OTHER; note = 2'-O-methyluridine-3'-phosphate
  modified_base 14: mod_base = OTHER; note = 2'-O-methyluridine-3'-phosphate
  modified_base 15: mod_base = OTHER; note = 2'-O-methylcytidine-3'-phosphate
gcctggagtttattcggaa

SEQ ID NO: 1500 - RNA, 21 nt, synthetic construct
  source 1..21: mol_type = other RNA
  modified_base 1: mod_base = OTHER; note = 2'-deoxy-2'-fluorouridine-3'-phosphate 5'phosphate
  modified_base 2: mod_base = OTHER; note = 2'-deoxy-2'-fluorouridine-3'-phosphate
  modified_base 3: mod_base = OTHER; note = 2'-deoxy-2'-fluorocytidine-3'-phosphate
  modified_base 4: mod_base = OTHER; note = 2'-deoxy-2'-fluorocytidine-3'-phosphate
  modified_base 8: mod_base = OTHER; note = 2'-deoxy-2'-fluorouridine-3'-phosphate
  modified_base 12: mod_base = OTHER; note = 2'-deoxy-2'-fluorocytidine-3'-phosphate
  modified_base 13: mod_base = OTHER; note = 2'-deoxy-2'-fluorouridine-3'-phosphate
  modified_base 14: mod_base = OTHER; note = 2'-deoxy-2'-fluorocytidine-3'-phosphate
  modified_base 15: mod_base = OTHER; note = 2'-deoxy-2'-fluorocytidine-3'-phosphate
  modified_base 19: mod_base = OTHER; note = 2'-deoxy-2'-fluorocytidine-3'-phosphorothioate
  modified_base 20: mod_base = OTHER; note = 2'-deoxy-2'-fluorocytidine-3'-phosphorothioate
  modified_base 21: mod_base = OTHER; note = 2'-deoxy-2'-fluorouridine
ttccgaataaactccaggcct

SEQ ID NO: 1501 - RNA, 20 nt, synthetic construct
  source 1..20: mol_type = other RNA
  modified_base 2: mod_base = OTHER; note = 2'-deoxy-2'-fluorocytidine-3'-phosphate
  modified_base 3: mod_base = OTHER; note = 2'-deoxy-2'-fluorocytidine-3'-phosphate
  modified_base 4: mod_base = OTHER; note = 2'-deoxy-2'-fluorouridine-3'-phosphate
  modified_base 10: mod_base = OTHER; note = 2'-deoxy-2'-fluorouridine-3'-phosphate
  modified_base 11: mod_base = OTHER; note = 2'-deoxy-2'-fluorouridine-3'-phosphate
  modified_base 12: mod_base = OTHER; note = 2'-deoxy-2'-fluorouridine-3'-phosphate
  modified_base 14: mod_base = OTHER; note = 2'-deoxy-2'-fluorouridine-3'-phosphate
  modified_base 15: mod_base = OTHER; note = 2'-deoxy-2'-fluorouridine-3'-phosphate
  modified_base 16: mod_base = OTHER; note = 2'-deoxy-2'-fluorocytidine-3'-phosphate
gcctggaggtttattcggaa

SEQ ID NO: 1502 - RNA, 21 nt, synthetic construct
  source 1..21: mol_type = other RNA
  modified_base 1: mod_base = OTHER; note = 2'-deoxy-2'-fluorouridine-3'-phosphate 5'phosphate
  modified_base 2: mod_base = OTHER; note = 2'-deoxy-2'-fluorouridine-3'-phosphate
  modified_base 3: mod_base = OTHER; note = 2'-deoxy-2'-fluorocytidine-3'-phosphate
  modified_base 4: mod_base = OTHER; note = 2'-deoxy-2'-fluorocytidine-3'-phosphate
  modified_base 8: mod_base = OTHER; note = 2'-deoxy-2'-fluorouridine-3'-phosphate
  modified_base 12: mod_base = OTHER; note = 2'-deoxy-2'-fluorocytidine-3'-phosphate
  modified_base 13: mod_base = OTHER; note = 2'-deoxy-2'-fluorouridine-3'-phosphate
  modified_base 14: mod_base = OTHER; note = 2'-deoxy-2'-fluorocytidine-3'-phosphate
  modified_base 15: mod_base = OTHER; note = 2'-deoxy-2'-fluorocytidine-3'-phosphate
  modified_base 19: mod_base = OTHER; note = 2'-deoxy-2'-fluorocytidine-3'-phosphorothioate
  modified_base 20: mod_base = OTHER; note = 2'-deoxy-2'-fluorocytidine-3'-phosphorothioate
  modified_base 21: mod_base = OTHER; note = 2'-deoxy-2'-fluorouridine
ttccgaataaactccaggcct

SEQ ID NO: 1503 - DNA, 21 bp, synthetic construct
  source 1..21: mol_type = other DNA
  modified_base 1: mod_base = OTHER; note = guanosine-3'-phosphate
  modified_base 2: mod_base = OTHER; note = cytidine-3'-phosphate
  modified_base 3: mod_base = OTHER; note = cytidine-3'-phosphate
  modified_base 4: mod_base = OTHER; note = uridine-3'-phosphate
  modified_base 5: mod_base = OTHER; note = guanosine-3'-phosphate
  modified_base 6: mod_base = OTHER; note = guanosine-3'-phosphate
  modified_base 7: mod_base = OTHER; note = adenosine-3'-phosphate
  modified_base 8: mod_base = OTHER; note = guanosine-3'-phosphate
  modified_base 9: mod_base = OTHER; note = uridine-3'-phosphate
  modified_base 10: mod_base = OTHER; note = uridine-3'-phosphate
  modified_base 11: mod_base = OTHER; note = uridine-3'-phosphate
  modified_base 12: mod_base = OTHER; note = adenosine-3'-phosphate
  modified_base 13: mod_base = OTHER; note = uridine-3'-phosphate
  modified_base 14: mod_base = OTHER; note = uridine-3'-phosphate
  modified_base 15: mod_base = OTHER; note = cytidine-3'-phosphate
  modified_base 16: mod_base = OTHER; note = guanosine-3'-phosphate
  modified_base 17: mod_base = OTHER; note = guanosine-3'-phosphate
  modified_base 18: mod_base = OTHER; note = adenosine-3'-phosphate
  modified_base 19: mod_base = OTHER; note = adenosine-3'-phosphate
  modified_base 20: mod_base = OTHER; note = 2'-deoxythymidine-3'-phosphorothioate
  misc_feature 1..19: note = RNA
  misc_feature 20..21: note = DNA
gcctggagtttattcggaatt

SEQ ID NO: 1504 - DNA, 21 bp, synthetic construct
  source 1..21: mol_type = other DNA
  modified_base 1: mod_base = OTHER; note = uridine-3'-phosphate
  modified_base 2: mod_base = OTHER; note = uridine-3'-phosphate
  modified_base 3: mod_base = OTHER; note = cytidine-3'-phosphate
  modified_base 4: mod_base = OTHER; note = cytidine-3'-phosphate
  modified_base 5: mod_base = OTHER; note = guanosine-3'-phosphate
  modified_base 6: mod_base = OTHER; note = adenosine-3'-phosphate
  modified_base 7: mod_base = OTHER; note = adenosine-3'-phosphate
  modified_base 8: mod_base = OTHER; note = uridine-3'-phosphate
  modified_base 9: mod_base = OTHER; note = adenosine-3'-phosphate
  modified_base 10: mod_base = OTHER; note = adenosine-3'-phosphate
  modified_base 11: mod_base = OTHER; note = adenosine-3'-phosphate
  modified_base 12: mod_base = OTHER; note = cytidine-3'-phosphate
  modified_base 13: mod_base = OTHER; note = uridine-3'-phosphate
  modified_base 14: mod_base = OTHER; note = cytidine-3'-phosphate
  modified_base 15: mod_base = OTHER; note = cytidine-3'-phosphate
  modified_base 16: mod_base = OTHER; note = adenosine-3'-phosphate
  modified_base 17: mod_base = OTHER; note = guanosine-3'-phosphate
  modified_base 18: mod_base = OTHER; note = guanosine-3'-phosphate
  modified_base 19: mod_base = OTHER; note = cytidine-3'-phosphate
  modified_base 20: mod_base = OTHER; note = 2'-deoxythymidine-3'-phosphorothioate
  misc_feature 1..19: note = RNA
  misc_feature 20..21: note = DNA
ttccgaataaactccaggctt

SEQ ID NO: 1505 - RNA, 3636 nt, Homo sapiens
  misc_feature 1..3636: note = PCSK9 mRNA
  source 1..3636: mol_type = mRNA
cagcgacgtcgaggcgctcatggttgcaggcgggcgccgccgttcagttcagggtctgagcctggaggagtgagccaggcagtgagactggctcgggcgggccgggacgcgtcgttgcagcagcggctcccagctcccagccaggattccgcgcgccccttcacgcgccctgctcctgaacttcagctcctgcacagtcctccccaccgcaaggctcaaggcgccgccggcgtggaccgcgcacggcctctaggtctcctcgccaggacagcaacctctcccctggccctcatgggcaccgtcagctccaggcggtcctggtggccgctgccactgctgctgctgctgctgctgctcctgggtcccgcgggcgcccgtgcgcaggaggacgaggacggcgactacgaggagctggtgctagccttgcgttccgaggaggacggcctggccgaagcacccgagcacggaaccacagccaccttccaccgctgcgccaaggatccgtggaggttgcctggcacctacgtggtggtgctgaaggaggagacccacctctcgcagtcagagcgcactgcccgccgcctgcaggcccaggctgcccgccggggatacctcaccaagatcctgcatgtcttccatggccttcttcctggcttcctggtgaagatgagtggcgacctgctggagctggccttgaagttgccccatgtcgactacatcgaggaggactcctctgtctttgcccagagcatcccgtggaacctggagcggattacccctccacggtaccgggcggatgaataccagccccccgacggaggcagcctggtggaggtgtatctcctagacaccagcatacagagtgaccaccgggaaatcgagggcagggtcatggtcaccgacttcgagaatgtgcccgaggaggacgggacccgcttccacagacaggccagcaagtgtgacagtcatggcacccacctggcaggggtggtcagcggccgggatgccggcgtggccaagggtgccagcatgcgcagcctgcgcgtgctcaactgccaagggaagggcacggttagcggcaccctcataggcctggagtttattcggaaaagccagctggtccagcctgtggggccactggtggtgctgctgcccctggcgggtgggtacagccgcgtcctcaacgccgcctgccagcgcctggcgagggctggggtcgtgctggtcaccgctgccggcaacttccgggacgatgcctgcctctactccccagcctcagctcccgaggtcatcacagttggggccaccaatgcccaagaccagccggtgaccctggggactttggggaccaactttggccgctgtgtggacctctttgccccaggggaggacatcattggtgcctccagcgactgcagcacctgctttgtgtcacagagtgggacatcacaggctgctgcccacgtggctggcattgcagccatgatgctgtctgccgagccggagctcaccctggccgagttgaggcagagactgatccacttctctgccaaagatgtcatcaatgaggcctggttccctgaggaccagcgggtactgacccccaacctggtggccgccctgccccccagcacccatggggcaggttggcagctgttttgcaggactgtatggtcagcacactcggggcctacacggatggccacagccgtcgcccgctgcgccccagatgaggagctgctgagctgctccagtttctccaggagtgggaagcggcggggcgagcgcatggaggcccaagggggcaagctggtctgccgggcccacaacgcttttgggggtgagggtgtctacgccattgccaggtgctgcctgctaccccaggccaactgcagcgtccacacagctccaccagctgaggccagcatggggacccgtgtccactgccaccaacagggccacgtcctcacaggctgcagctcccactgggaggtggaggaccttggcacccacaagccgcctgtgctgaggccacgaggtcagcccaaccagtgcgtgggccacagggaggccagcatccacgcttcctgctgccatgccccaggtctggaatgcaaagtcaaggagcatggaatcccggcccctcaggagcaggtgaccgtggcctgcgaggagggctggaccctgactggctgcagtgccctccctgggacctcccacgtcctgggggcctacgccgtagacaacacgtgtgtagtcaggagccgggacgtcagcactacaggcagcaccagcgaaggggccgtgacagccgttgccatctgctgccggagccggcacctggcgcaggcctcccaggagctccagtgacagccccatcccaggatgggtgtctggggagggtcaagggctggggctgagctttaaaatggttccgacttgtccctctctcagccctccatggcctggcacgaggggatggggatgcttccgcctttccggggctgctggcctggcccttgagtggggcagcctccttgcctggaactcactcactctgggtgcctcctccccaggtggaggtgccaggaagctccctccctcactgtggggcatttcaccattcaaacaggtcgagctgtgctcgggtgctgccagctgctcccaatgtgccgatgtccgtgggcagaatgacttttattgagctcttgttccgtgccaggcattcaatcctcaggtctccaccaaggaggcaggattcttcccatggataggggagggggcggtaggggctgcagggacaaacatcgttggggggtgagtgtgaaaggtgctgatggccctcatctccagctaactgtggagaagcccctgggggctccctgattaatggaggcttagctttctggatggcatctagccagaggctggagacaggtgcgcccctggtggtcacaggctgtgccttggtttcctgagccacctttactctgctctatgccaggctgtgctagcaacacccaaaggtggcctgcggggagccatcacctaggactgactcggcagtgtgcagtggtgcatgcactgtctcagccaacccgctccactacccggcagggtacacattcgcacccctacttcacagaggaagaaacctggaaccagagggggcgtgcctgccaagctcacacagcaggaactgagccagaaacgcagattgggctggctctgaagccaagcctcttcttacttcacccggctgggctcctcatttttacgggtaacagtgaggctgggaaggggaacacagaccaggaagctcggtgagtgatggcagaacgatgcctgcaggcatggaactttttccgttatcacccaggcctgattcactggcctggcggagatgcttctaaggcatggtcgggggagagggccaacaactgtccctccttgagcaccagccccacccaagcaagcagacatttatcttttgggtctgtcctctctgttgcctttttacagccaacttttctagacctgttttgcttttgtaacttgaagatatttattctgggttttgtagcatttttattaatatggtgactttttaaaataaaaacaaacaaacgttgtcct
